United States Patent Application Publication US 2026/0258423 A1 - sequence listing, part 28

SEQ ID NO: 167803 - DNA, 46709983 bp, Homo sapiens (residues 35,032,495-36,700,708 of 46,709,983)
  source 1..46709983: mol_type = genomic DNA
aaacggaccagactttatgatcagtcccgtgactatgaatcctcttggtcatagacatttgttttctacacaggtattcaatttaaagcctgagccaatcagctcatgggcagtaagatgtcccttgactgtggtgtttctcacatgcttctccttgcacacttgtccagcttcccacaagggacacctacatgacttccagcctggcacctctggacagaattggaaccacctccatgttgcctgctcctctctgctctaatattcccacatacagcttcttacccttagctgatcacaggaattaaggggaaccaagtttgggtggaaatcccagttacttacttcctgctgtggttgtatgtgagaggagatcagtgtggcctcttctgcttacatccactgatgtttttacacttaagccataagcacaggactggtgaagctccctccatccattggtccatctatctgtctatccatccatctatccatccatccctctatcattcatccatccatctatccattcattcaactatctatccatctacctgcctatccatccattcatttccattcatccttctatctatccatcaatttgtccatctgtccatctgctggctcattcattcattcattcaactatctgtccatccatgcatttgcctattcatctatccatccaacatttcttgagtgcccaaattctgccagtttctgtttttggagaggtaagtgacatatgagccatctctcaaattgctcagagtctctgaaagaacacactcataaacagaaaagctggaattatgttttggtaagagcaaataaaccagagcaagaagaagaatgtgatcctttgcacgagctaccaatgagcatcctagaagacatggtcatcagagtgtcagcctggaagtattactgcttcagggagcaaacgcagatggagtgtgtccatccatgtctgtgatggggatgtgggattcctgttctctgtccctctaacacctcatgcagacacatgtcccaactctcataacctgtgcaatgacttctcttgctgaacaacagccctgtcaggtgcctttaatgactactaccagaaatttcgggagaaattcaagttgttcaaataagcatggagaagtgacctcccagagaggatttgaaaataacacatagaaaaatgaaactaaatatgcattgggatttctgaaacttttgactaaatgtattatctataggtccttgaaatctatcattatcttgtcttttaggttactttcctcctagatttttaaagtcttcaaagaaatactgatgatccccactaggaaaagagaaggaaaatgagttattcaaaatcaggcactgggaggactcagaattacagcattattattacttccaataattttaaaagagttaagggctctttgattaccaaatcattatcctacttcctatgtcatctataactagacacgaagataacttattttaagtttatttcacaggacaagagtaccaaagtcacaccctctctagaaggccttctcttgaaaaatgcacagcttattcgtcaggcacccagacttcaaaaccagactaggattgagtgcagccctgccatttcccagctgtgtgaccttggatgaaatatttggccactctatagcccagtcatcaatctgtaaaattagggagagtaattgtctccactgtgtagataacagagatggcaagcctttgttgcgccagcaggccagagtcatggctgccttttcttctctgctcttcacgtcggggacatggctgatggtcttaatttcatgcccttgcacactgactgtcagtttttgtggacatctgtagccagcattagtaggctggggtggggtagaggtcaaattaggtgtgtgggaggcaaacatgctaaagagggtcaaacccgccacatcattttatttctttgtgggaagcagcaacagtacctcggttcctaaggtctttctggagctgtggttctccaaaaaacattccagattttacccctcaggggtcatctggcaatgtctggagatacatttggttgtggcaacatgaggagggaagggttgtcactagtgtctagtgggtgtgggccagggatgctgcttagcagcctacatacagcacagagggcagtcccctcaacagagaatgattcggttgcaaatgtcaactgtggcgaggtcgggaaaccctgtctggtgtgagcagagggcagatcctcagcctccatgatgcctttcaccttgaccatgggagctgagtaatcccagccactagctctctcattttacccgagagatgtacaggaggaagatcagggtacaatggcacatcagccagggctgagacccctactcagcctgagtctgttcctgttatactccccacctcatcccaagcatcagccgtttgctgccaggagtgaacagatccagtgtacaaggatgcattagtgaccacgcgcactcactgggataacccacttggggttcacttgttagatttggtttgggtagtgtgtaaggaagaaaatgggaaagtccagtcaaatagtgtccaatttaaaatcaaatcagggtggaaaggaaaagtccatgatgatagcgaccatgtatcgggcagcatattctatgtatttctgattcagtgctcgcaacagctgcatgggtaatcatcatcgtcacactgtacagatgaggaaaagggagaaacagaaagggtgagtagcctgttcaaggtgactcagcgggaaaggacagagctggcatttgaacacaggctctcagaccccacaggctgcacctgtaaaactctcctccccacaccctgtcacatcacagagaggccagatgggagtgggaaagccgaagagaatctggactccaaccgagttctgcctcctagaagccgtgtggcctgggctgcttttgtaacctggtttttgcttcattttattttttatttttagccagtgggaattagtagctgtgcctatatcgtgaggttttgattaaaagagacaatggaggcagtgtgcctcacaccattgcaagtgaatgttatttgttctcattattcataagccacaatgaaacggcatcatctcataactttagtgggtcagccagaattgttcacgacaacagtgcggaggacacgggacagcactaagggttcctccctctccctctcgtttgacgcggactccagattcagaacccatgtggggcacaggtgggggctgtccaggctcactgcaggtctctctctgctttctgctccttcaggtcacgtggttgtgattgaaaagaggaatagagagatgtgatgtggctgtttaaaacaactccaactgcttccatgtaaatgatgtgtttgatcctaaactgagagggttaagggttggaactctgggcctccccagaggctgctgtgggtctgggggccaggactcctcaggaagaacccaagttgggtctgaaggtgacagtggaggccattatccctgagggaagacagaagagggagcagggagcaggtgggccaccgagccctggcgtgtgtgcagaaagtgctaaataagccggaagaagcacagcaaatcacaaggatgcccagaatataatctctagtttatagcatgaaatttttactttcctgttaattgtacattctgtataagaaaagcaggttcctttcctaaggagctttatgattttattatattattattgtttattgtggagaataattagcttgcacatcttttaatttgtcccattaagatgtttgcagagcagccgtgagaggctggccagccccctgcatttccattgatcagggcactcacatggctggctgtgagcaggctttgcggggagaaagtcatttatgattgcatccttcagcatgccgaacccctccagaaagggaaggaactttctgtgactctgaagtagtctgttgtagaataaccagaggagaaatgccttttatacaataaaggtgaagggggaaaagaaggggaaaaaaaccccaacttcttgacaaaaggaattatcatgatgtcagaggactggtgacatggactttgtgaaatgacaaatgcctctgcagaaaggccattctcaaaggccaaccagtaggcgtgtgcatctcaactcttgttatgccactgacacttagtggtatgaggtcctgtttacatgagtgactgaggccactgcttgctatcacagctgaaacaactgcttctggctacgatttttattttagcctcaggaataagtggatgagaagtgtttggggcaagcttcacggaaaaccctggctagggtcagtcagggttggggtggtccacccctgaaggagggactcaggtggcaggcccctgattgctgggtacatcactctgtggtttcttctgtacatgtgttccatggcctggactgggacagggcaagagatatacctgggacacaaaattcaaggtggtgcgctctcaagcccatgtaaatgcaaggtcagccttgtacaacaatgggagcaagtgtcgccttaagtttgtcacaggaagtgcctcatttatgtcaccctgatatcaccttcgatggattctcagattgataaatgaaaacaactggtcggtcaggaagaaggcatagcagtggtttctccccaccccagcatgtcaccatcgtcttgggaacaagtttgagcacccctggcttaaaggcgtgtttcttgtgggctgtctgggaactgcctgaacatctctctcagttctgatgggagaaacacgtgggcaggagaggtctggataccagtggtggggccataaagccaccaaatgcatccagagtcagaaaagcagtccaggatggtggccagtgccccagcttggtgccaccccacagcgtcgcctcctgtccatggggccttggcaagcctttcgctctgtaaggctaaactccctcatgtgccaaacagatattctcaacaccgacctgtcccctccacgggcagacagacagtgggctctgctgcaggaactgcctctgtttggaccgcacctccacctttcccagcagcctaaccacaagcaggtcacgtaaccttggcaggccatgcttccccttcactcagtgggattaataatgagagcacctactcacagggttgtgccaaaattttaatacagtaaggcaagaaaatgcttggaacggtgcaagtgccttgcgcatagcatatgctcaataaatgctagctgttattactatcggttttaaagttcataaactcagccttctgccaaagagcaccaagatcacttctgcactgctacatgatgagagaggcagacatttctttttttttttttatcttcatacatgcccagttcctggaacagcttcggggccacgttcttgaggttggcggagatggctttcctgtccctagcctccctttggtggcattttcagagttaccttgtacttattgacttcctctgcgtgtccattgctttatacatattgtctcaaatcctcttgacaaccatacaaagtagggctcattccccttgtttacagatgagaaacttggggctccgtgaggttcgataaatggctcaagttcacacaggtggtggatgatggtgacagggagaaaccaatacctcgattctaaagcccacaggcttcctgctccccgatcccacccctgagcttgggcctatcttcctcctggcctccctatcaaaggcaactcgtagaagaagcccctggtgataaagaaaacacgattcctcctggagctgagtggagtttacacttcaacatggactgaagcctccagggaaagaaataaaggtctgtagagagaagctacgtcctggtgagcagagacatgacagcagcagtttctgctacacctagagaaagcttccttgaattcagtacatcctggggagaagtcccaatggattccctaagcatgggaattttgaatgctggcctctctctctctctctctctctctctctctctctctctctctgtgtgtgtgtgtgtgtgtgtgtgtgtgtgtgtgagatagagagagagagagagagagacctttatttctcctgagaggccacttctgagctttgaatcaggagtgatgtgagcatatatatccctaatgggaattatagtttgggttccaatttttatacaaagatctcccacttcccagggctccttccagagctgaagcctggcagccttggccgaggccatctctgaaccctctgcatggatgtgcacattggctgttgtggtggttcaaattttgccctagaccctcatcaaaaccaacctggttaattgtaacattgcctaaggagccaggtgggcaggcacatggtgggtgcttaaccaaggtggtgctggattttggggaagagagaacatccaaatgacagcaggggccggttactcctatggcaactgcatttctaacacagcctaaggacgttcttaaggactcagggattcatatacattgccctgcctaatgagttcacaaggtgaagggatttaacctgcaaaggattgtggtatctgagcaatgcaaaggggaattgaggaggattaggagaagtgtctgctagttatgtgcatgcttgaatggaatccacctcataaattcagtgtctgcaaaactgtgggtgacaggagctgagaagacctggtttctcgttcggactctggcaccaaccagctatggaaccctgggcaagtgaacctctctggtgccctaaggtagagaaatgtctaaaaatcactccagccaaatattcggctcttcctttctagcagtttaaaaatatttataattatagattttaaaaaataaagttatataatttttagatgccaactgaaactatacagaactatatatatacataactctatataactctatgacacagcacataaaacttacaaagcatcatatagaacaatgtctcatagttcatatgtctcagggttcacttattttttaaacagatttattcacatctgtaatacaattatttctttgttttgaatacaacctggagggaagcatatgggagacacagcctttatttaaaaaaatgaagtaatgatatggaatgattgacagttggatagaattttcattgtcggcacttctacttctttatatgaccctgcacctttcacagtgctaatatttgtttaaggttgcttaacgttgttcctctcctctagaactttggaagtaaaagccattctcatctttagaaacagtagattcaataataataaataataataaactagaagcctgagtttctgttcctacctgtcagtcaatgcctaaataatttcattttcacccattcacccattcattacatgaaaggggctgggataagagagaacactcctgaaggggaggactactttttctcctccttttagttcctacccactcttgcatgggttttatacacatatgtggtttcagattttatgaattctatactttcaaagtgggtgaatgtcaagttcagctgtgactgttaccgagctggatgaagctgcccagatgcagcctgcagatggtgtggaatgaggggctcagtgcacagagttcaaagtgcaaacagaagctgtgtaagaaagtgcagcaaactgtggttggtgttaaaactgctcctgaaaaaaatggcactcaaaccaatgtatcttagttgacctaaactctcttttgcacattctggggcagtaataagaaacaaacattgatagctatacatattataaaattttgcacagtaaaaggggaagtgcttctctcttgagcaatgagtgccactctgacattttttgtctcccttaaaaaactcacctaggatgggccgggtgcagtggctcatacctgtaatcccagcattttgggaggctgaggcgggcagatcacgaggtcgggagatcgaaaccatcctggccaacatggtgaaaacctgtctctactaaaaatacaaaaattagccgggcgtggtggcacacacctgtaatcccagctactcaggaggctgaggcaggagaatggctgaacgtgggaggcggagattgcagtgagctgagatggggccactgcactccagcctggtgacagagctagtagactccatccaaaaaaaaaaaaaaaaaaaaaaaccaacaacaaaaactcacccacaatggaatgtgactatggaataccctgcggtgtgttcagagctctgacttctgtttgctctttttaacataacccccatctggcaagctgactgctgcaagattttctgggtctttctttaggatctactaacaatgaaaaacatatatatgaaaacctacacattttcagaagcacatgagagctgatcaagacccacgtacctcccaaggagaggagatgacagaggctgctctgtggtgttgctctcaggctatatttgatttattgctcaaatcttattatttcattctccattcgagactagcaaagtttcttttgagaagtcacagtctctacggagggtattctaacgcccagaagtaaaagttggatgttggcaaagaaagcaaagtagaatctttgcaaaatgttggagctgcatagttctctctcccaatggacatgtttcaagactgaatacgttgagtatttgatttagaatcaatttaacatgaacttcgcatttatgcaaagcagcatcagtcctgagatcagcagagcgattgagcaagcccaactagcaaactgagatttctatttgtgatgacctttcccatttgaggccccaaaaatgtcttggggaactcattgtttaaaaagaagtccatcaaaaaatggacacatatggaccatggcatgggagggcagtgctgcatacaaaatcaacaattctctaaatgaacaccgatcttgcagaaaaacaaaatgaaagcaaaacaaaaagaaatttctaatttcaagagaaaaactgaataacaactttcttttcattcatcctttctttcttctttttctttctttctttttttttttttttttaacgaagcaatgactttctcagggagaaagatttgcatccatgctgaggaaatagacagggccagtaatcacacagcaacaatcatctgtaacttgcagaaattcaatgtatgaataagtgtttaaagcctagatagagggcaattatctggttatctgtttttcatatttctatcagagataaaaacctctttagggaaatttatgaagggccatttgaaagaaggtttccctcttttgtagaaaagaattctcttaaaaattaaaacaaatttgggaggctgggggatttttgagagtttaaaagagtgaggaagatggggggcgggaagcaactatttccagctgcgagaaaccgatcaacctcacagcaaggtgtggtggctctgatgcaagcaacattcccatagatacagggctgtctggttttctattgctcattctaacttgaggagacgctcaagtgtgatttggggctttgacactgaaaataggtgtgaacttggatccatttaacctagccccttcccccacctcatcccttctcctgtccagtttgctttcaatgggtcaacaataaatattcacccttggcatccatctgcaacttccaagagggaatgaaggaagaacataaagtttctctgcatttgtttccaaagcccagctggcacagaaaacaaatgatacaagatatgactgggaaggcacacagcctgtctttgtcaccaggtctggcagatgtggctctgggttcacgagacatctgctcccagctaccttcctctctgcttccctccactctccaggctggaaagtgacaactccattgtcctcagttccctccagccagaggcctgtgacctagttgtggcctaagcaatatgtcagcgaaagtttgcagagaagggcttcccttcctgaataaaaataccaggacccacaagaaggggttgaggcctcccatgtcctttctgcctggacagatcagaggtgcaggccatctctccctggcctcagcatggtgggaccaaaacataggagtgtcctgcaccccaccgtatcagcctggactgctcactctggaactcctgcccgtctgctcaagccactgtggtcagcttttctctacgtgcagccaaacataattttcatgggtaaacctgagcaagggccttactctttctgtcactgcaataaaatacataatttccgtcatgtttcggatttagtgtttattcctccaccttggctcctttctggcatcattactcagtgttattgcaagatgagggagggagagaaagagagagattcagagagccaagagagtataacacgtgtctccccaacaaagagtgaagcctgcgcaagtgagagcagtgtgtctgagcttatcctcccagcatgttgaaggtgacaggaggttttgagccctgttttgtgttcaagagccagcctgtgttctcgtaaagtactccctgattgtgttcacggtcagcaaagatctcaaaggaaatgctccctttttaccactccaggacatcctagttattatattttatgagagggaagaggtcaagaaagacatacctctttgccttggctggaggctcagcaaaaaggctaaagaaggggactggtggcatctgatggggaggagcaggggaggccgagaaacaagagttgtgggaaaagtgctttgaacattttaatatctgttcaggcaccagtgtagcttctgaagatttcttgaaaaatgggagttggagaaagcaattacgaaaatgagggaaaatatcttgcatttgtgaaatgatgggagaactattttctaaacagaaaataaaatatttttaagtggctttgtgttattaagctaagaagatttgtgatgtgttttatggtacctctttctgatgcatgtaaagacttccaacaggaacttggtaatttagatgcaagcttgtctagaatattattagcccattttgcagaactcaaatgagacacaaagacatctattgactcatctaggtcactaggaagttacctgagaaactgaaaatttgcttgagtttcctgtgtgggcctcctctgctgcctccaacaagacaagccatcaaagctaccttcatgtctgggctttgacaaagtacatgattacaaatgttcccaaggagcagggaaaatgggagtctctcagaggcccagagaacctgctcaaaggtatacaggcaaaatggccttttccttaagaagagccttggagaaaataaagctacaccagcagtctcaatgaaaagagacatctctgttgtccttgtgtgttcagatcaaagacttagcatgacatcctgccccaactagcctccatatttaaaatcaaaacttgttaagttgaatttcataaagggctctcgttctttttccacaagggaaggaaggctgacctgctggtgaaaagcccttagggtggactgagttacccactgctgtccatgcccatgtgggatcctgcagctctaactttgcccaggctgtactctcggcctagaccactcttccttctttcctttgttcccaacttcccctcccccaactcctgtgtccctctctccagggagcctcctgtaatgtcctccagggcattgtgacctctccctccctagagcagacagcggttgactggctgccttcttagataactgaacattgatagccaccattcagatttattgcttactttatatggctgggcaaagcaccttacacagattaattcggtccacacagctaccttaataacaggtactattgcaatccttactctgcagatgaggaaactaaggctcaagagagaagttctatatgctatttgatgaaagccagaaaaaagaaaagaaagaaaaggccatcactgtgtcatctgagcacattccctgcacagacctcctgccattgctttctctaatagcaggtgctcttatgcctccagactcttctctctaggccttgggctccttattaaagtctgtgtgtgcacagcggctgtgcagccgtcctctgtcccagcatctcaccaggcttgatttctcagtaaagggctacatattttctgagcacatctttcggatctattttgagagaatgtaggaacgtctcagctactcatttgctttcaaaagctcagaaaggcttcttgccattcagaatcgggtcagttgctgtttccaaaggtgcttctgctactggttgctccatgcccctgtactcggtgtgtgagcagctgtggggcctcctacagccccctaaaccccactaataaagtcagtctgaagtacaaagacaatcctccccaagaaagcagagccaagaggaggtttctttggggcggctgccatttgctcttttaacacttaaacatttcaaaattactcgtcattttctacagtttcttagcgtgcaaaaagtctaaatggcaaaggcatgattgtgagtttagatagttttatcacaccttttttttttatagtttcaaaatgtgtgggcagtttcagatgtgaaactccatctcacaaaggaggaactacagtctgattctttaacatccaagagagcagccaggatgccccatcccacagtttccttgtgggccagggtgggtcagatttgctaagacccactgttagggactgcagtatgtctccctagaattaatacattgaagtcctaaccccaaggtgctcataatttgacactatttggacatagggttttaaaatgacgtcattaggctagccccaatacaatgcaattggtatccttataagaagagattaggatacagacacacacagagggataaccatgtgatgaaacagggagaagggagctgtctgcaaaaccaaggagagaggcctcaccagaaatcagccttgccgacaccttgatctcacacctccagtctccctccagaactgtgtgaaaataaatttctgtggcttaagcctgaagtcttaagatcttaagtgttcagtcaagccagaagaagtgtcttaataaatattcttctgaaaagagcggcaagccgatgcttagagaagaacatactttatacatgcagctttgtacttggcaattccctttgaaagactgcttcagtggggtaaacttgaaccgctgagaagacaagcagggagtcggtctcgctgagatttttacctgtggttctaggaacgcagaggcatgtgagtgttcaggctttgcatagaccactaagccacttctaagaacaaggctacctgagccattttgcaaaaatatgtacgtgccgaggcttttcctccccacacctacctcaactctttctgccgacacactgcacttttcaagggaacccaagtttgggttcggcaagaattgtacgttgcacaccgtgtgtgataattccagggaatttcaatcgcatcttgtcttccttcctaagcaaattcggtgggaacctggtgtggtgtgatagaaaaagccccgagttctctgtggtagaccacatcaatttcatgtgccagtctctcagactccggcttgcctctctcaaggaagggaacaatggtttgcttggcttcactcctctctttccccccaatttccacatgggtatctggctaaaaatgagttacaggtttccttctgtgagaattgcatggactgataaagtaccatcccaggaagaaaacaaagatgctgtcttccctttcggctcacagttgccgttggggagggaacacacgctgtaaattataggcagccagaagtgaccgcattgaccactgcgagtggcccagctatggcaacaggctgagaactctgggggagagccatttgttggcagggatggtgattcttctagcatcaagctctaagatgatgaccaaacggtatcaaaagaaatgatattttgctacctctccggcttgggtgaatgatgtggacagttaacctggacaatttaaacctttatgttgatggatcacttggatgaaattaaccaggaaattgccaagatttcacttggccctctgacatcaaatctcaatattatattaccaaattagagattctaaagaaccctgagttcctttcactgaaaggaaggagtggaaaaacctttccagatgatcccttttgagtcttggtgcgagctcaggccctccctacactgcctccgtgaaagctaaccgacccttgttcctaacctagcgcaggtcagctgagtgtccatcgggcacaggagccctgggcttgtccgggagatagccagactcctgctatttcctgatgtctgcatagctcagcgtgtccctcaccatctttgccgttggccagtaaggagagccccaggggccagcactgcacactgaaacccaacctattgctcaatggaatgcttaaaaatttcctgaatctgccttcctgagttgataaaataggaaacaatacacgttctgagggggtactgaaagcagagtaaagccaggaagatcttttttttctgttattctatacaaatattgcttcctctgcttgttagcagcccagaggaaatgcagccagggagccgtttgcagcttttcaccagtggccggtgtctctgtgttaccaaccaaacgacgctgcaagactagtgactaacgcacgtctgcatgattcaacttcactaaaattccctctgctgccagtaaagaagcacttgaaaactctttaatttgaaacttgagcttggttaatgacttgttttcttctctttctctttaacttctctcttgccatctccaacacacacacacacacacacacacacacacacacacacacacacacactctctctctctctctctctctctctctctctctctcatcaagttttttaatttcagggacccggaaacatacagccccgtgcattcacaatagcatttgctgtgataaagtggccggcaagccctctgcattcccctgctcacttagctgtatgaataaataatgagtcacagatacaatttgggtgctcaagagagtttgtagccagaaaattaattattctcccatcccagcccactccatctcagctttgccaaaccatcaagatacactttgcaggcactggtcagagtgcgtgccccgacgcacacggcaatgcctttgagacattttatgttattatttttgtttgtttaagcacagccctcttttaccacgaaagatacacaagacgcacatgcacacacatactcacacactcacagctcaaccacagctttgtccatttcaagaggctggtttcaaaaatggagacaggttttccaccctggctgttcctattcataagcctgtaatctaacgacttaagctgcgagaatgcttaactcgggaaacttctctattgcccttttccagagagacctcggtatgccacaatttgcttcctttctctcttgaaagatgctggttgtctctttgcattgaggctacaaggaaaaacacagcacagccccatgctgatgattttaacctaaccaagtctgtcagtctcctgtactctctgccttatagagacagctgccttgccactttggccctgaagtccccaggctggtgcaaggctatctgagagcctccgcctcctgccccacactggcaccagccctcctggctggctctgtgcatgtgcctgctaagccccagggcaggctgcattctgggccacacagcatgccgagttaaggataactcagacacaggcattccgggcaagggacagcaaaataaaacccagggagcttcgtgcaagcttcataatctctaagcctttaaacaagaccagcacaacttactcgcacttgacaaagttctcacgcaccgactgaacactccaacagcataactaagtatttattaaaacatttctgaagagcttccatctgattagtaagtaatccaatagacttgtaatcatatgcctcagtttgaattcctctcacaaacaagacagggaactggcaggcaccgaggcatctctgcaccgaggtgaaacaagctgccatttcattacaggcaaagctgagcaaaagtagatattacaagaccagcatgtactcacctctcatgaagcactgtgggtacgaaggaaatgactcaaatatgctgtctgaagccatcgcttcctcctgaaaatgcaccctcttctgaaggcgggggactcaatgatttcttttaccttcggagcgaaaaccaagacaggtcactgtttcagcctcacccctctagccctacatctctctttcttctcccctctgctggatacctctgggactccccaagccctattaaaaaatgcacctttgtaaaaacaaatattcaaattgttaaagattaaaaaaaaaaaaaaagccagcgccgccttggctgtgggttggtgatgctcaccacgctgcgaaaccctgtggtttgcattcagtgtgattcgtcctgcctgctgaccactatgctgggttcagacttctgacactgccaggctacccaacttgtggttctgtggttgtttatgaggcccaaagaagttttcacacaacccaaattacaaatttaactgttcccctttccacagcccatctcaattggttcttgccaatcatgtgacttaagtgatgtcaatttttttttttcttttctgagcaatgcccttccttccctccacctgccctcccccaggctgtgcaagaaaatagccgagtagactttgcaagagggggggatgtagaaaaaagtgactcagtcacttattatatctcaatggtctttgctgatttagtacaactcggctcctgttgttatttgtggtttttggaactactgattattttgataaagatttcattgctgcttattcaatagtaattcaacgctggcatcaagccgctgctccgacaggatgtggatcccatcatttaaaatgctaggcatcagctccgggagagttaagtccttggtaacgtctatcatggcataagtgaaactataaaagggaaaaataaataaaaagaaatgttttggtgagagtctgacccctacaacgggctggcaactcacaggtattttaaagcctgggaaagggaaagaattttacttttgaaataaaaggactgttttaatgaaaccaaaattatgtggttttattccccctaaatggacaactttagtatgtatctctttcagtaaagagataaaatcatagtacagtcttaacacacacacacacacacacacacacacacacacacacacaaattaggaagctaaaggaaaacaaagcagagagaatttctgtatttgggacaaagcagtggttactctgcagatgtttatttgtattgtcacttgggaaagctccctgtattgcctttctctagttcaattcaaatcaataggctaatttacacctgtaggtaaaactacactttgagcacatgaggatgccacaatagaaggggaaccaggaggagacacttctcctggggctgactaatgaatattatatagcgcgtcctctaccttagaaagacatgcctgtttgaagatgctaaaaacaggataattttgtaagtgggcaaaccactgtggtcacacgtatttcattttccggccccactggctttacctgctgacaactaaaacgtcattttgttttgtagttccaagatgaagaaaggcttattttcctgatttactaccttattcatttggctctgctctgcctacatccgccatagcactctgcgcacgtgaaatttcgacacatagggtcaagagaacctgtgtgatgatgggttgtaaatgccagtcctggattctaagctgcagtagccagcacaggcacttcagaaaggctgaactcccacaacactccctcggttttccctcatccacttaatttcacacacacaaagacccacaacgatagtagcttccatggcacaagtctttcaaaaggaacagacacaatttttacttactcctgttttgactaaagcaggaattgaaactcaacagaccgctttctcttacacttgtgagaagttagctggccacatgttgacactgctaacatctaaaaaagaataatagtgctacatctcttttatgaggctcgtgaatctttaaatgtgatgcgtgtttcatattgcttctcagtgcaaatcccctgtgaacataatgaacataatgggcctgtgttgttaccctccctaataaagtcaagcctgagttgaaccccaaaccaggttcatttttctctcccacacttaatattccctggaagggccctaagagccgagggctgtaatgtgcagctgccactgcagagtcgactcacacttaataatgacttagcaattcaaggggccatacagaatatccttgggagatttaattttagaaactccccagatgcttttagccttaggtgtccagatgcttaggagaagggtttggatgaggcagtgaacggcctgaattctcaacttttctctttgggcctagctctagccagatatctatttcttccagtggggtctttgtaggacaggttagagtgtaaagacactctaaggctggggctcgttgaagcctcactatacgctgtcatcttcgggactgaggtttcaacagggcaccagggggcagaatacaaaggcctgcacgctggccctgcacggccttcctgggcggggttaacagccacggcagccgcagcataacttcgcagcttggtgaggcaacagttggagcttttctgggcaccctccaggtcatgacaataagtaaagcctcagccagctgctggtgaacttggccttaccacttccctaggagcccaagacaaaagggcacgtctgtcatcaatgaaccgcctggagaaatacttaatcctaacttaactagaacggtttaggactctttaagtttgtgtattgacccacaccctctgtcctagttcctgcaagtgactcagaccctgggtttctggcttggggattgtacccaagagtctgcagtggactgtggctttgccaaggaattggatgacagttttcattctcgctcatattggctgcagcttctaaatgccaccatgggtgggggggcggggtggggagaaaatgctcaggtgtcttttttaatggccctatgaaaatactagaaagggttgacagatgtttacctgcataaccctgtaattaatgtatagacttctgtgtgcagtccaatccaatcaaagcaccctctgttagggatattcattacatgattgccgcatgctatctctgaactccacatgtctattataaagtagattctctggccagaaaatggaggcagagatggaccacccaaattggatggagtctaaaatcccaggaggacaatgctactgaattttctctatgtagcgtggattttccttattttctaaatctgttttctaacagatgtcctatccagaaacttccatgctatgctgacagtgaggtcagggatgatttttaaattgggacgtagacatcaaagcttcatgggatgactataacctgcttttggcaaatccaatggtttgagacagctagggagccctagaagcccagctattaaagatgttctttcctggacactcatgatggtgcccacacaggacacatctctcttccgcacaggcctctcacttctttagataaaggtgcaattcaaatttaagctacccaagactttattttttttgagacacagtcttgctctgtcgcccaggctggagtgcagtggtgcgatctcagctcactgcaagctccgcctcccaggttcacgccattctcctgcctcagcctcccgagtagctgggactacaggtgctcgtcaccacgcccggctaattttttgtatctttagtagagacggggtttcaccgtgttagccaggatggtcttgatcttctgacctcgtgatccacccacctcggcctcccaaagtgctgggattacaggcgggagccaccgcgcctggcctcagtatttacttcttaacctttcctagatgaagaggtattgttggggaaatatgatttcaaaaggaaaaaagaaagaaaaaaggcagacattgaaaccaacctgccacttgaatgttatgtaatgatatgaagagcagctagggagaattatttcaaatgaaagagtttcaactgcttcctcctctgcttgcagactgcaggtgagcagtgtcgatggcacccaggaacttgttgagactctgcattgcgggctgtatcccaggcctactgaatgagaatctgtatttttacagttcctcgggtgattctatacacattaaagtttgagaaacattgctgaggaaagccttgcatctattggaatttagtagagaaataataacatggtgtttgcattctttgagatgtctttttcttcctttgagctttctgaaacttttctactttgttgctctgacataattttgtaagccctggatgtttctagacagcagaaacccacaagaggcaaggcccacgtcctctaaggtagcattttcttggattgtcactcggacctctcatctcaagtgccgtgtttgggtcaagtttacagtctgaggtttgacacacaatgtagggaggctctccctgtgctccatctgcctagctggtggccatgtgtatataaacagaaggctttttcctctgggggcaccagactctcagttttcacctagtctgcagtttggaaacacattaatcctgtgagttcttccagacacacagcacgtgtccacgtggcaggcagcgtcgcaggtggccttgcagtcctgccatgggctgtccccctcccagagggttgcctggccccgctctccagccactgccttgccgaggtcatgccctcctttgctgcaaaagaaagggcccactcttgaattgtgcttccttggaacagccaagcctcccaggttccagaggctccatttgtgcaggcacccaggggtttggctacttctctcagacgcatctgggtcctttcaggctgctctgggccagaaagcttgtttaaaatagcttctccttacagagttttggcccttctgcttctggtggcatttgaaaccaggagggtaaaactggaaaacttaaacaaaccctctttgaatgttagaaatgttcagcattcgaggtttggtcaaatgatggaaaacattccgggttggtactgaactttccagccagttcctccaacctgacgctaattatagcctgagatccaggcagggaaagcaaagggaaatgaggaaactaaaattacttggagttagagaagccagaattcatgttggtcagatagtgtacaattcaatagttcagtttatgtggcaaataatggttaatgtcccaagtctgatcaaagcacctggattcaggaactttgcactcttattgaaatgctacttcttttccctggggtaggcaaattaccaaactttcacatggctatttagaaactaaagcataacactgcctttttcactggggtgctatgagggtcagtaactggactatgcaaagtggttttgaatggaacaagaaagagatctgtggttgacatttcaatatggaaacatccagtatgtgaattttaatatctgcacttgccagggattataaaggcatgactttagggccctaactgagaggacccagtaggatcgagctgaaaataccctctgtagttggtgctacagagatctttagtattcaccacttaatttttgaattaaatgttcctttgaaataataatactcagctctacagattcaggctaaaattctttcagatcctcaaaatgtccaaatcaaataaaaatatcaactcaactgagaaacaaaatattgtacttaaaattgtgtggtgtgtattttaatttcctcctctctaaattccctttccttcctcttgccagtatagaaactggctggatttttggaaggagagcaggaagaatgatcttgtctatgttctggttctgatttcatttctttctcaagtttttagtttattcaaagcagaaggaagaaatcaccttgtaccccacattaacgtaactataactaccaggatatgatctttcaagcatttggggctgattgtgaatgatccaccacataaagccatcactggctcttgaaatatatgtggatgtatgtatatgtattgtatattatatatgatattatattacacatatatgtattacatatcatgtatactatttatttatttatttattttggtaagaatatttaacatgagatctaccctcttaaccaattttcaagtgtacagtattgttaaaaatacttatatataggcattatgctgtacatcacatctctagaaagtagtcatcacgtctaattaaaactatgccaaccgagcaatttcagatttctccctcctctcctggtaacttctgttccacttgctaattccatgagtttgactattttagatacctcatattaagtaatatcatgcagtatgtatccttccatggctgacttatttcacttagcataatgttctccaggttcatctatgttgttgcatattgctatacttcctccttttttaaggctgaataattccactatatgcatataaccatattttcttaattcactcatctgccaatggacatttaggttttttccacattttgcctattgtgaatagtgctgcaatgaacttgggagtataaagaaatatctctttgagatcctgatttcaattctttcgaataaatacccagaagtgggattcctggatcatatagtagttttatttttaatttttgagaaaccttcacattgttgtccatagcagttgtaccattttgcattcccactaacaagtataatatgtgtgtgtgtataatgtttgtgtgtgtatatatgtatgtatatacacacatatgaaatcaaatatatactaattgaagatactgtttcacacacaaggcttgtatctgagatactaatccttccaggataagataatttggagaattagcaagcattagcagaactaaagcattatttggagtaaaaaggaagagtattcttctggtttccatagtcagagggcaatgctatttgtgtgccagacacatcagagctataaaggccttcgattattgtggaatattacttttagttggtctccctgtgcttttttcacattttagcattgttcataattctctaactttatattgaaaatgaagtcccaaggatattatcttttgcccacatggactgcatagtgtgtgaactgagccttcagaccttactcagactcagagttgatgctgaacagacattagggggtttcagaaattacctgcagctcttaaagaaattctgagctacttggaaattttatttcttatgtctgcattagtactgtcatcaatgaacagaagttcatggagcgtgcactgtcaaattttgcaggtgatcttcaacctattcctgtggtgcttttgtgtttaaacaaagaatcccatcattatccttttgattggtctcacttgccaatttctgctacttttaaatcacatttccatgattgatggacctcttttctatctacccctctatatttgctatggccatacctatttacgtgtgtacacatacacacacacacacacacacgtgtatatgtgtatacatatacatatgtatgtatgtgtgtatttagctttatcttctcctcaaaacctaactctaagagcccttcctccatttccttatctattagagtttacatttgggtctgtccccccacaccctgcttgggctcatgatttttatgcttttatataattagtgtgtagcatgctccaaggatcatagcaacattgctttcctgtgatcctataattcttttttttccttttttttgagatggagtcttgctctgttacccatctggagtgtagtggtgcgatcttggctcactgcaaccttcacctcctgggttcaagtgattctcctgcctcagcctcccgaatagctgggattacaggcatgtgccaccacacccagctaattttttgtatttttagtggagacagggtttcaccatgttggccaggctggtcttgaactccggacctcaagctatccacccacctcagccttccaaattgctgggattagaggcatgagccaccgcgcctggcctcctataattcttttattattgcaacataaatttacttgtcttaatcttaggtagaattattcagttccccctttatccctgcattgtttatctcttctgatctttttcctgggccttaccaaatatcaggaacaccccactttctctgcaaccttatatatttcactgagtatttattgagtactcaattatttcactgagtatttattttctagccatggacaagatgaacctggttggttatacttagaagaaggtttacagtcttataagccattcacattggaaatgaatgaatagcaaatactgaaagcacaggtatggccaggattaaaactagggtaaggtgagtgaggctcccaggatgcaaaatttaaagaggcatcgactctcagtgtcgaccccgtgtcgcacaacctgaagggtgagggcttccttaaattttgcaccttaggtgcctctcttgccttgccattgtcctgaccttgggtatggctcatgaaactaagcagagaccatgagctgggcagagggcggtgtctgagtcaggaaggggttttgtggctgaaaaacttgtagccacaaaataatggagtcctgagctggaccttgacaacatatgcaagtttcattttgtctgtactagacgtgtacagttttgaccgacaaaagaacagggggaggagaaagaaggggaagggctatgaggtgaaaggcagatcagaaataagcccagcttggaagaaagtgaggatcccaacctggcagagaaagaggagctgatgaaggagactagagaaggacccgtctggaaatacagaacttggtccaagtaaaggaggaccttgaaggtcaggctgacaaatttgcttttattctgtgcataatggggagtcaccaaaacccaggaaagtgaggggatgaaatcagaacttttggaaaattgatccagtagtggcatctatgattatttgattaatctattgactcttgatagcagaggtcttggctatttttgctcattactgtatctccagcatctatcactgtgtttgatatgcagaaactttttgatgaatgaattaatggataaatggatggatgaggctttattaggactagaggctggggaaccagaggttgtagtattcagctatggagtaacgagctccttaactaaggatgtgggtagcaggaatggaaagcaatgggactgtgatagttgactgcattaagagcctcagttttttggacctccttgtaatctttccctttgccctgtaactgtggtctcatcccactctgaccctgagcttggccttatgacttgctttgggacagtcacaaacttgatgtaaccagaggcttaaaatggaaaagtgcttccacatcagaatatgctgggctggtgtatgggaaggtgagacacatggaagacaagagccagtcttcccagctgaggctatcctagaccagctgatagctagctgaccactggccacttaactgagctccagcccaatgtagaagaactggccagccaaacccagccataaccagcagactgccttgctttctcatagaaacacgatcaataatacaggattgttgtttcaagccatagagttattgggtggcttgtaagactgaattattgtggcaatagttcctgcagaagaggtagagattctgaaagcatcagaatggagctgcagctgtggctgcaagactgagtcagttaatttgcaaagtaaaagagaatataaaactgaaggtggggaatgaataaaagaaaggagtaggaggagaaaggagccagaggaaggctggcaagtgaagtaggacaaagataaagggagtacagtgcaagccaagggaggaagaattgtcaagggagggaagggaaacagagttagatgctgaaaacagagaggcatgaaaaacaaagactatggaaaggtcaacagatttgataagaaagagttacttgaggtctgttccttcatgacacctcatcagactaaacagaagggtgacatccaattttgctggcatgcagatgagcagttcttcctctgcttgaatagaaagttaatatgaagttaatgattactcttttgatgttgttcgaatatatatgttgattatatggcttttctgtttcaatttaattcaaaaatattaatatagcatgtacttgatagaacagagataaattacatgtaaagaaagattttgagtactccttgttcctgctttttttaaaaaattttttattcttatttttaattcaagttttattttaggtatagagggtacatgtgcagatttgttacatgggtgtgttgtacccaggtagtgagcatagtacctaatatgcagttttttaatccacagcccacctcctttcccactctagtagtctgcagtgtctattattcccaagtttatgtccatgtgtgcccagcatttagctcccatttgtaagcaagaacatgtggtatttagttttctgttcctgcattaattcacttagcattatggcctctagctctatccatgttgctataaaggacatgatttcactcatttatggctgtgtgctattccatggtgtatgtgtaccatagattctttatccaggctaccactgacgggcacctaggttgattccatgtctttgctgttgtgaaaagtgcagcgatgaacatatgagtgcatgtgtttttcgggtataatgatagtagctctgtttcaagttctttgagaaatctccaaactgctttccatagtggctgacctaacttgcattcctatcaatagtttataagcattctctttttcccacagcctcgccaacatctgttgttttttgactttttaataataaccattctgactagtgtgagatggtatctcattgtggttttgatttgcatttctctgatgattagttacagtgagcaatttttttatgtttttgggccacagatatgtcttcttttgagtagtgtctgtttatgtcctttgcccactttttaattggttgttttttgattgctgatttgtttaagttcctcatagattctgggtattagacttttgtcagatgcatagtttgcaaataatttctcccattctgcaggttgtctgtttaatccattgatagtttcttttgctgtgcagaagctctttagtttaattaggacccacttgtcaatttttttttttgtttcaattgcttttggggacttagccaaaagttatttgccaagaccaatgctgagaagggtatttcttaggttttcttctaggatttttatagtttgataccttacatttaaatctttaccccatcttgagttagttttggtatatggtgagagctaaaggtccagtttcattcttctgcatatggctagccagaaatcccagcatcagtcattgaatagggagtccttccccattgcttacttctgttggctttgtcaaaggtcagatggttccaagtgtgcagctttatttctgagttttctattctgttgccttggtctacatgtctgtttttgtaccagtaccatgatgttttggttactatagccttatactgaaggctatacccaacttgaagttgggtagtgtgatgtctttggctttcttctttttccttagaattgctttggttatttgggctcttttttggttctatataaattttataatcgttttctctaattctgtgaagaatgacattggtagttcgataggaatagtgttgtaaatttctatgggcagtatggccattttaacaatattgactcttccaacctatgagcatggaatgtttttcgatttatttgtgtcacctctgatttttttccgtggtattttgaagttctcctagtacagatctttcacctccttggttagctgtattcctaggtgtttcatttcctttgtggctattgcacatgggattgtgttcctgatttgactcttagcctggacattattcgtgtatagatatgttactgatttttgtacactggttttgtatcctgaaaccttactaaaattgtctatcagttagtagtcttttggcagagtcttaagggtttctctatataaaatcatatcaccagtgaagagagatagtttgtcttcttcttttcctatttggataccttctttcttttgcctgattgctttggctaggacttccaacagctagattttgaaagcatgttcgagatgggctgttgtggggtaaatagggatggtccttcaaaaagaaggacagttcacagcagctgtaggtgatgagtcttggcaggatgctgtggccactggtgctattaagatatgatgaatatgggataacagagtgaggtgtccagggatttccaaagagtgttcaagaactatttggacacctgatcctcagggaagatataaaaaggtcaagagtgggcactgaagaaggaagtctttgaagagagtgattgaaatgtaactgatgcactcgtcttctccgaccttagtgaccaaagcatagaggggagcctgtctgtcacatgaaatctagcaagaggggcttgaatcggatcatgcagggagcatgcgtccatcagtcgaggtctgacttatcccctgggagagtggaagtgtcctcttgtaaagtaggatagacagggatagcattaggaacttcccacatgcccctttaggaatcctcaaatatggaatccctaaacgagatgttggctaggcattgttttaaaagggattttgcctaagaaggtggacttttcaggcaaggagattttagcccagagaggttatgatacagaccactgggagcagcagccaagaaggaagggaggaggggccgatagcctagagagggtacagcttctgtaagggcagtttcagcagaaggaccctaatgggagtgccaatcaatgtggaacccatgagagtacacagggcagaagcaattggcaataaacatctatgaggcccagagagagctgagccatctgatactagcagcagacaagcagcctccccatcctcctccctgtctcccttcaccctccccagcatggcagtgtgagatgtcttggttagcaaggagtaagggtggatggaggaatctaggctgctggaagaaaggagcttggccacattccattaacccaaccaagcagtcgccccagtaggctccaactgtggctatgggagtcaaatcaagttttcagttttgatgatttgagattctgcgatttagagtgaccataggacttttcttatctaagtgagaggcagagaaaggatcgcccacattgaatatatttaaaagaatagtgaaagacaaaaatcaagtgagttttcaaaaagtggaaacaatacaatgtgtccattgagtcgaatggatgaatggatagaaaaaatgtggcgtacatgtaaagtgaaatattattctgtcctaagaagaagtgaaattgtgatgtgcactacaacacgggtggacattaaaagcattatatttagtgaaatcatccagacacagaaggacaaatattgtacgattctacttatgtaaggtagccaaaatagacaaattcatagagacagaaggtagaatagaggctaccaggggctgacaggttgagggaaaggcaaaccattgttggatgagcatagaatttcagattggaaagataaaattctggagatggatagcagtgatagtcgcttaacaaagtgaatgtaattaatggcacagaattgcacacgaatgaatagttaaaatgataaatattatgtatattttaccacaataaaaaaaattaagtggcttgtatgattagaattctttgtgtttaaaataactctttatatccatgataagactcttatataatggtttatataatggtctgtacatcttctgggtgagtagcagtggatttatttattaattattactcatccccttccccttatcaatgctgggttggacacttggatatagatatggccaagacccggctcttggctttaggtgattgggttagtgtagtctatcttttgtcgtgagaccctcaagaaggcttgtttaattcagtgtgcaacacagttaatataatacttcttaactcattggcattactaaatctttattatttttatgataattagaggaagcaattagaagactgtccagcaaaatgattcttcagaaagtttctgatttagctgcattctctgtggcactctatacctgctgtctacttacagaggaacgtagagttgtgtcttaattgagaaaaataaaacttaaaatcatttttttctagaatataaattactattattagggttgactgcaaaaactctacagacccacaaactcagacacacacacaaacacatacacacatacatacacacacaaacacaaacacacacacaaacacacatacacaaacacacacacacaaacacacacaaacacacacacacacacacacacacacacgctttagtccaggatattgatttcactttaaactctggcctcacttggcacgaatgtttgggcaagccctaacatattacctttgggtattccccattcctgtagttagtcaaccacacagagggcagatctagaggagataactgatttaatgataagttaaaggattaatcctttttctgcagcatcttaatatgcagagattatcttgtctgatgcctgagttataaatatattgccactcgtgtttaatcccacacaccacctatcttttccttgaatctactcaagtgttcaacaacagccttctaggtttctgcctcccaggtaattcagatgaaaccaggaaatcatgctgataaaatagtttcatcctgcttggaattgcgtacctcgcagtgcacccttttcagagaagctaaaggaaattcaaaataagagatggagtcatgactcggggatgacaactatgtctctgtgttctgctgtattcaggacagtgtggatcatggactacctaggacctgcttctgaaggtagtgagaagcagactcaaccatgaattcctttagactcagagcccttcacctattaatatatacaacatacacacattttaactccaagacttccatttttattcctatcacttatccaatctagggagctttagcttaccctctctttttgagtggactgaaaacatttggataaatcaggtgattccaccgtacttcaaaccctcaccttaatggagaaacatatttttggcccatcacttcctttgaatttcaagtttatccctaccaaggacatatttctctgatgtactgagggtaggcttgccagacttagcaaaacaaaacaaaacaaaacagaaaaacaaacaaaaaacagcatgtattgttaactctgaagttttgagaaacaatgaatgagtttttagcatgtcccaaatacagcatgggacacgggtaaagaattattcattgcttgtttgtaattcaaacttaactgggcagatttaattcatttactttaattcatttaatctggcaatccctgttgacagccaagatgtgagacatgcatgtggacacatttcacctaagaaacagaaagctttgggggtttatttaaacatacaggagaagataatagagtacgccattgaacttcaatcactgcaggctgctgtggattttttttttttccttttttcttgcatccttttcaaggacctggagaagtgttaaataccaggctcaccctgctaatggtttgcccaccagtaagaaacaatggcaaaagggatcatttaccttgttttctccatgcgggactcacctgctttcgggtccaggcgaactcgctgtggtattgttcttctctgctcggtttccaaaggagagcccaggcgcgttaattgctgggtggcagctacactaaatgcaagtggacgacagctgggtgccgggctcgctctgcaagagaaggtttgggtttccattgtagtccgcatcataatccgcacccttccatctgcactaactgttgttttaggtctcaagtaattggctggagctgaaaacataaacacctccacgcgcttgcccttatcattttctttttatgttggtttaggaaatacacctgagagaccaaatgcatacaatgaatccagcaattaccaaccaccatgggcggacagcaaatgctcaaacaacaaaacacccaaggatgggcggctgctggcttctgactttcctcatggggatgggggtcccagatctgggtctaggactccctcccacttctgtcctgggacagctgatttcaatactgccaaagacgtggaacttttcttaagaaggttctctcctgatttattttgagtaaacaactgatacaggttatgtatagtgctgggaaaactaatgcagagaaagaggagggacataactagttttgttgtcatctgtggaacatttaattgcaaaattgttgaaaggaaaattagacctctctttccccctccccgcccccccaagtatggctttggcagaaaaatcccaaagaaaattagaaagtggagattaagggtgaagatagggagagacattcaaaaacaccaccaccatttcatacctttggggctgagttctttagtcattcaacaagcatttcttgaccacattctatgtattggacaccgttttactgagcaagacaatttagaatgaggttgtgaacatgaacttggagctacctgggtttgtaatcccagttcagccacctactagctacgtgtccttgagccatctacttaaactatctgtgcctcctttctctcacttgttgaatggaaataataccattaagtccttcataaggtctctgtgaaatggaaataataatatttcttaccccatagggtcattgtgaggattaaattggttaatgcctgtgaagcacttagaaaaattcttggtacatattaactaccaagtacatattagctcttatttggtggtgatgttgtgttgctgtttaacatgaacgaatgtgccatgtgacattttgcgtaaatgatgatgaaagggaagaaacattaccccaaacctattagtgaaagactgggtagacatggtttttactcatgctccctcctgcagatagtaaattacttaggaagttgtttttgtcactttctactttggtccccaaacatcaagaacatggtttctttaaataattcttgaaaaattgttagaacaacaatgatatgggctatccataggaacatgtagaaagcatgtttgcaatcacctacctgaaaattagaattatcatcttgggtatgttaaattgaattaagtttggcccaaagctgcctccatccatattttaaggttggcctaacagcttctccacgcatagcaaactgtaacctaacctgatggttaaacagacagtagcctacgattgtaacaagtagccaagtctcagtcaatctgagcagttgagtttcagccaatcatggggaccaactgttcaacctgtgttcttaaaaggcgaacactgagctatcaccaattcagctgtttctgtacccacttctattttgtgtacgtcacttttctttttctgtctgtaaatattatccatgcagcagtcctggggttgctctgaatctattctggtttgggggtggggcggggtgggggggtgcccgattcatgagtcgttgtttgttcctacattctgttaaattgaacgtgtctaaagtttttctttgaacaggtagtgggactgagctactattcagaatattctctgtgccccactgtggctcgccatcataccttctgtatcttttgcttatcttcctgtcatgagactagcaaggtcttgacagcactcacctgaagccatcaatcaatcagctgaggaagacatcaatctctgtgattgtaaactactgagatcgggtagtttgtgtagtttgtggccttaatctagcccaccctgactgacacattgactctaaccaatgaccacctaacccattgttttatctttatttgatgccaggattgcctttttgttagttggttgactcttacaggaagagtagatgttcatgtattaaaaagtaaagcttggccaggtgcggtggctcacgcctgtaatcccagcactttgggaggccgaggtgggcggatcacgagttcaggagttcaagatcagcctggccaacatggtgaaaccctgtctctactaaaaatacaaaaattagctgggggtggtggcgcatgcctgtaatcctagctactcagcaggctgaggcaggaggattgcttgaacccgggaggcggaggttgcagtgagctgagatagcaccactgcactccagccagggtgacagaatgagagtctgtctcagaaaaaaaaaaaaaaaaaaaaaaggaaggcttacatcccaaataatttgtgtttccttagtaaattactatggatccgctacccatgcattcatctaagttcaccatcattttacttattcacttatttaacagaccttctgttagtaactagtttatattggacttgggtcttggttctgggggaagcaggtaagtggttcagaaatgcgtaaaacagggttcctgtcctcagcatgcttatcaagagtgcaaaaatctgttttaggtgacataaagttctagacacttatttgctgggcaaagtagagttgtgtcctacttgtaccactctgtttaaacttcaagcccttccccctagctaccaatattttatgagttggcattgacttagtggttactctaatttgtagtcttcacaagggttaaaatgtaaatcacatcttttgcaccttgacttttcagactaaacatgtgtgtttatttaaattaatctctcattgactgtcctcactatcttcataatgttagttaccccttatttggctatttaaacctcagtagtttttttctctttggggcagatatctagcttaagcaaatctctccagattttgacaccctgtgactttgttggtgagttttctctgtaatttttttattttttcaaaaaatatccagatgataaacactgtaaatatatttttgatttatgtcaatttctggccagaattttctagataataacttcagtcttctgttatttttccccttgtcattcactcatgcttgggattttatatgcactggggtctgggataagggagtaaaatttacttaactttgagcacattgtcactttttccagcatcttgggtatattacatatcttattaattgccaaatgactcctcttttaataagttctcaaatcttttagtagatctaagctcttaaacaaataaacccaatatttcttgtagacatggacaaatgaagttttgcatttcaaccaaagtaagagaatagtctttaaaacacatataaaataagaataataacaggaaatgttttctcttcctctagtgatcatattttcacttggaaagatttttttacatgaacagaaaaggaaagtaataatcttatttattttaattatcaaattaaccatcgttgatgacttataaaatactgctgttttaaaaaagagaattaaaaattaataaaagacaaaaatatttaatgttgatgtcttcaactatgaaatgcattaagagtttgctagttatatattagctgccatagattgactctctcgctaagcaccttacatggattacctgatttaatcttcataatccctttttcatcttcattacccctttttcatcttcattctcattgcagatgagaaaaccatagcataaagaggctagataggccgggagcagtggctcacgcctgtaatcccagcactttgggaggccaaggtgggtggatcacctgaggtcaggagtttgagaccaccctggccaacacggtgaaatcctgtttctactaaaaatacaaaaatcagccaggtgtgctggcatgcgcctgtaatcctagctactcgggaggctgagacaggagaattggcttgaacccgggaggcggaggttgtagtgagctgattgcgccactgcactccagcctgggtgacagaatgagactccgtctcaaaaaaaaaaaaagaaggtagataatttccaagtccacatagatagaaagtgtgggagccatggcttcaaacttaggcaggctagctccaaattttgcacaagtcaccatggcctaatagtgtccaagctattctttacctttcctttttgtttttgttcttaatccaagactcagttaagataggaaagaagagatttgtttcaataggaattcaaatttcacatgctttgtagatgaacacaaggatcatttgcttcagattaatagaaatattttctctaaagttcagagggtttgtaggaggtggcttccaaattttcttgtctttcttgtctccacgatttacattgtttataaggtgttcaattatactacaaaggggccatacatttcttttggagatttaaaattatcgttgagggataatataagttgaccatgtccaggcctactttttgtttataaaagtcagaatacagttaggttactttagattttattcaatgagagagggtgtgagttagcagttctagattgtgccgtaattcaaaatgatcaataaatctttcctttctcaaaatactctgagcactttttatcactcattaaattaatatcgtgtaccaccctagactatatagctatagtcttatcttccctgacagattgtaaaatttggaggttacaggggatatctaattcattgctctggtgcctttcaaaattggaaagctgtaggagcccatcacgtttttgtttaagtggtgtatcagttatctattgctacaatcatgctgcagaacaaacatgccaaaaacctacgtgcattcaacaatgaatgtttatcattgttcacaccttatgcctcagctgggcaaattttctggtctcagcagagctcactcacgcaactgtggtcagctgaaggtgggtgagcagttctgttgatattggctgggctctctcacatgttggggccagctagcctaggacagcctcagctgggacacctggactaacctccatgtggtctctcatcctccaggatgctagcacagtcacgttcacatggaagtgacagagaaagtaagcagaaatgtgtacagcctctgcaggtcttaaagcttggaactggcacattgctatatcaactacatcctattggccaaagcaagtcataaggccagccctgattcaaagggtgggaaatagactttgtctcttaactggaagagattcaaactcacattacaaagggtgtgtgtacaaggagggctgaagagttggggttaattttggaatcaacctgccacaaatagaataaataaatagtgacgaccaaacctcaccgggtggccttagattatccctcatttccttactgtaggcacgagaagtggcgttgtggagtggaaagtgggaggggctggcattggttggcttagagttcccagtgttttcacggctgcctgaccatgaggcagtcatgtcatgtccttaatcacaacttctcacctccctaagatggtcatgagaattcaatgggacaatgcacattgaattgctttgtaaattataaaaaagcatctgtgaactatcactgctgttatttcatttgaggctggggagcctgcctgcaattccactaatttgacagattctgaaaagcatccgcagaggatgtgtaaatcccaataaacaacatttctttcactccactctgagattgggtctgaaaattgcatcctgagagtcagagaagattgtacatagtggtgcagggctgcaagacatcacgggagcctgttgtaaatatgaagaggttttaaatgtgctgctgtgacaccaccttctgcaagaacagacatttattcctgctctaggtgactcccataccagaggaaggtggcacactgaaaatctggacttctgcatttatttctgcttgaagaattaacaagctcttaaagtaaatatagtcccaggttctccccttccaggtttcgtgacatcacagtgctttggggccttccccctttactgctgcctgggctgctttccctgccctgtggaagtgagaaataggctcctatgacattgaaaagagcgcaatttggagtactagaatggatgcattttcccactcttgtggtgctctgtgattaaaatggagatgtcttttgcataaatggcttgtaaagagtttcttgcaaaccccagtggtctggctctgcttatgagtcaaatgtgaatgccaatatttaacacattgtgagaaatgacatttaggaaaaaaaagacccaaataattaaatatgtgtaggagacagcccacattgtttgaccatgtatactattagtcatcaactgatgcctctgagacagatctgtgggcatttactatgcccacgaacatgtgggatctaaaattaaaagacctagccaggacaagaaagacaccagagagaatttgttgcttcagatttgattcttcaaaagatttatcactgcaagtataaatcctaaactcaaaattaccttcaatgccattgcacattgtatgtacacaaatgggatactcagaccaacaacgtaggtctttcttggtgctaagaacccacatgctgtatgaaactcagcgtggcattcatttaaaaccaaaccctcaccaggtgcatgtacattgggatacagactcatacctgtaatcccaatactttgggaaatcaaggagggagaattgcttgagccaggagctggagaccaatctgggcagtaaagtgagccccccacctctacaaaaacatttaaaatttagcttggcatgatagtgtgtacctgtggtcctaggtagttgggaggctaaggcaggaggattgtttgagcccaggaggtggagactgcagtgagctgattatatcagctgcactctacctgggtgagacagtgagactctctctctctctctctctctccccctctctatatatatgaataaaattcctatatattcataaattcatatatatgactagaattctctctctgtgtatatatatatatatgtgtatatatatatgtgtgtgtgtgtgtatatatatatatacatatatatatatatacatatatatatacatatatatatatatacatatatatatacatatatatatatgtgaataaaaacataaaaactaaaactccaggtgaggattgtgctgattctgcacatgcaactgttaatcctttgaaatggtgctgtttcacttgccctgccttaagtcagctggaaaaaatggttggcttttgcttttctaatttgcaagccacatacctttttcctggccctgcacactgtctcatcttgcttaggaaaggggctagagattagaaggtggccttggaggggcaggcctttcctcttgaccgacttgggcgccatcaggctatcagcagaatggctgaggccaggttggcgggggatctggggtgatccgaaagcaggactatctggccaacagcagcagcagtgtggtggtaggaaagacagcactgtccttttttcattaagtatatttataaacatactgaacatgaaacatttttcctttcttcacagtgatggatgattatatgtctatgaaatgttttcatttatttggcgccagggtaatcaaaatcagttgaaactgtcccactgaaagcaaagaaaacaagtaggcgtgggacgcctgtgctccctccctcatgctcttcaaggggagtcgctggcagaagggctcgctttggagaggaacaagcccttcaactcctaattgctcccagtcctgctcatggctgccatccacggaggctgcagctctgcagagctttcaaagcaatcgcctccactctggaggcagtgtgagagcgtcggggccagcctgtgcgtgactctgtttaggctgagaaagagctggtcccagaaaacctttgtgaatgaaacgctcgtgctttcatgtctgctctggcctgtgttctgggtcagctgttgtgatctccaacatcctgtttaaactggtgttttccactacatacagacaaaactatttctattataagcttctaatggttgtgcagagaaaagcaaggggattaggtagggaagaagggttgacctgttgggagagaaacatagacagtagatacatgcctgattccttcttttgatggggttctttggacagctacagaacccagatctttgttttacaaatgtagcatcacttttgaaaggccacctttttggtgaggtttatctagcctaaaccatgggatgattttgctcacttgtggacatctctctctctgtggttttcagtgcagacctgtttatagatgagggttaaggccctcagagggtagaaaacaattttcctgatctccaaccatcacctttcaaggaattagtttgaatattggaggagagaagagacttccacttctcaaatagattcaagaactcttaaaagtgaattgagagaatttccttttatttgttttcttattaaaataagcagagatctaacggatgctttttaagcagagcagaaaggaatgaacctcccttcttggctcctcattaacatggcacagaagggcttggagaggatccttgggactcccccgctgggcactgaagttatgggcaaagactgacagtccatttgtctcatgtgaactagcgatacagtgaagagatcagatacatccttaacattcccaaagctcaatgaaatagtaggtatatggtaaattagaactaataacttatagtcaagttctgaattggatggactgaggtcaaactcatacaaggtattggaagaaggaagacttaaactggttggtaaccaccagtggccattctgcgagtaagtagccttgcgtggcaaaagagcttcatggatgtgataagaaccttgaaatggggagattggcttggactctctggatgggcccaatgtaatcacaagcatccttaaaagtggactcgagagacagaagcatcagtgtcagagtggcatgacatgagaaagactcaaccaccctttgctggctttgaagatggaggaggagtccacaagccaaataatgtgggcagcttctagaagctgaataaaacaagaaaatggattctgccttagagtctctggaaaggaatgcagccctgctgaccccttgactttagccccatgagattcatgtcaaatttctaatctgcagaactgtaagagaataaatttgttttgttttaagccactaagtttgtggttatttgttacagcagcaatagaaagtctaatacactgggaactacaccaggaaatttacctggttcattttttggaatctgtgcaaactggctaaatggcactttgcattttccagtcttcttaaagagtacaaaatgttgtggaatctgactgcttgagcctttaaaaaaaatccagaaaataagagcaatgtctcaaccattttgagtatatggaacttggtaacatagcaaggaaaatcaaaataaaagaaatcacctctaccaacagatcaaaaaaccattttgatttttgagtgtaaccttttagaacatactcatatctagttttaagaaaattataactgtatttgtagtgtaaaaatcactgtcctagataaacacactgtgcttattttatactttttagctaaagaaaattagtgacctatcctaaggttcttaaatttcggaatttggagttactgaactcttcatgataagaaggataattggttgatacatttcacctacaagggagaaaagatttttaacctctgcaccatgccagggcatgaaattagcatttgtaagtatgaaatttgaataaaagttacaacattaaaagtttatctgcctaatatagacacgggcatcttttctgtagggagcaaggagcaaagttgaccattgctccttgctaccaacacacctacccgttatttttgtaaattcccatttttagctgtgagcttgaatgtgcccaatttctaaaagtaacaaaggatgtaaatgtcaaataatagagcacattgtatccaatatttaaaatagctcctggaatgctgaggcagtttgaaaaagacaaacacaggggtgtcaaaaatttttctatgtttcatattatttttccataattaaaaattagctactatgattaaaaaataaatctgtagcacttataaaagaacacataagaaaaggattctttggtccaagagagattgagtaattcttgggatggtgaccctgatttcaaacgtttggcttttcaattacttggtgtaaaatctggtacttctctaagaaaggaactgattaattcagaaacaggcagcaaccagcttcctcccagagataagatgacatcaccccaaagtcccagacagtatggtaaatacaacttcaaaataggcaatcacattcactgaaatgaagtccctgcagccaaccacgatcacccatcctctatcatcccgcctcattaccttagccttcagtgtcaggatgagcaaagctgggggcatccggccaagtcttacacaaatccctaagatatcttttatctccgggttaatagatcatgttaaggatttcagtggcagaaacggatcctatggacaatttaactctgtgtctttctagctaatacttttccctcacagagccaactgattcatttagaagaagcctttttattttcatagagctttcttccatttcagttagaatcttatctaaagtgagaataaattctcaaatgtttaatatgaaccaaggagaaagaggagaaagccccttaaacagagttcagtttaatctgtagaattaattggttttgtttgcaagcaaattacatatttcaaaaattatatataagatatgtttaagtatatacatttatgatatatttcaaaaggagatcaactaccattcccacttggtcagttcccagtagactctgacttcatttctgccttagcttcttccgggcttggccatgtttgcacacacttccttccctcatctagcatccatcattctcactgtattcaatttcttaaaatatacacaagacctcatacactcgcacatgcacacagtcacctacactcaggacaagctatatcatttttgaggttttgtatagaataaagatgtgggttcctggtccaaaacttattgagaatttcaagatggtggccaaaacacattggaccaagctcaaggcccttttgagtgcaagatacccgcaggcccttgcaaggtccatgcccatgaagtccacgcccttactgcattagtagatgtcacagctacacatatgcactccctcacaggtacacagcagacagcattcttagagcaactgagcttctacttgttgctaaaatttcccttttagtccaatgacacacacacacacacacacacacacacacacacacacacacacacatatatagtcctttgatagtgaaaagctcttattttctaataagcacacaggctaagtgacttatccaaagttgcaccaaatatgtttttctttctttttttaacttttattttagattcaggattttttttctgattataagtaagtataatacagcaaatttgaaaaatataaagaaaaagacacatttacaacacataaaataccaccaattagggatgaccactatttgtttcagtatatgtcttctattcctctataagtttttatgcaataatttctatagattctttctttttttagatataaatttaaatcatattgcacatactgcttaatatccttttttcatgtagtaataccacacagaccttttctgtattattaagcattcgtatagagcactatggttaatagttaccttatattctagtatggttggtaaagaatcagtttaggaacaagtaaaaaaatcttagagaaaagatgacacaattagtactaattccttttcatatcataactctcttactttaggtaaagagaaagatattggggctccaagagtttaaataatttgctacaagacacacagccattaaaacaaagatagaatttgaacccaggtctgcatgatggcaaagccagcacagaatcattgtacgatgacagtgacaggtaatttataactttactcagcagaagggctctggggtcagcatagcatgcagagccttggagattttcaaggcctggcagtttccctgttattgggaaaaggcatccaggaaaacctatggaactgagagagaagtcagagtctcagatgcatagtgatgacaagtaatagtcaggaaccactgctgggccaaagaagtttcactccggaaatcatttcctagtgaatgggaattcttttggtcacagagagttgacttcccacattagggaaatctagcaaagatggttgtacgcttataaaagcaaatgcaagaatggggatgggttgacttccgccttttaaaaagcagcgtttgtgatgaagtcccaagtcatgtggctattggactgtgttcttaccctccaagtgagaattcaggacaattttagagaaaatagtctttttcttaatgttttcaggaaagatcacttgaaagggatttccctgatgtaatgtttttcaccttccatattcatccccctcctgtttaatcagctagtttcttactgatatcctgagtaccgggaccctagtacaaagggggactggaaaagactcctggcataggcattagatgaggggaattttatgatgagtaagggtagcctaccatgcctcatcttgactactaaagaatcccttaaaagggaaggcaatcgggggtgtcttcatttcctgtaggtactgtgacaaattacacaaacttggttgctcacaacaacagatatttattccctcacagtcctggatgccagacgtctgaagtcaaggtgttggcagagctgttctctcctaaaagcctcaaggggagaaggcttcttccctcttccaggctccggtggctccaagtgtcccttggcttatggctgcatcactccaatctctgcctcttcatgtgaccttctcctctgggtctgtgtcttttcctcttaccttgcttattaggacacttgtcattggatttaggggcctcctggataatccacaatgatctcgtctggaggtccttaacatagtgatatctgcaaagacccttttcccaaataaggtcacattcacaggttctggggcttaggacacaaacatatctttttcgtgcccactattcaacccattagagagcgggaaacttagaagttgatgtgtcccagggaaacgctgctgagccctcctgggtgtagaccttgggcagggccttctttcctggataaaactctggaaaggaagaaagggcttacactcggggctgtttgggttacaaaggtagacaggtctctgagtgcttcttagttctttatacagcagaatgacatctgtcagttccagaggggcatcaaggtagttgagggagagaaatccaggcctaaaggggcctggcagatgggaccactcacctgtgtggcaaagaagatgtagggtcaggtggggtgaatgccccctcagcaggttcctgcctggaaatagagggttactgaagacctgggcctcactttcccagcccatgtcttggcatggcatagccttgggactgggcatctactctgggctagagggcattgccaaactggaggagatgagttttgagtttcatggaaagaatagagagtcaaaatagaaattggtgatgttacctttctaactatactagagttcttcagagacacagaaccatcagaaaatcacatacacacagaaaatcacatacacattgaaatgacagtttggtcaatgatgcatctcatatacgacagtggccccataacatacagtggagctgaaaaattcctatcatctagtgacaccatagccattgtagcatcatagcagaatgcattgctcacgtgtttgtggtgatgctggtgtaaacaaatatgtttaataactgtagtatagcccaagtgcacagtatttgtaaagtctacagtattgcacagtaatgtcctaggccttccccttcactcaccactcactgattgatgcagaggaactgccagtcctactagcaccattcatggtaattgccctatacaggtgtgccctttcaccccgccctttttttttttttttttttttttttttgaaacagaatcttgctctgttgcccaggctggaatgcattggtgtgatctcggctcactgtaacctctgcctcccaggttcaagtgattctcctgcctcagcctcctgagtagctgggactataggcgcccgccaccacatccggctaatttttttttttttttgtatttttaataaagacggggtttcaccatgttttgccatggtgttttgccatcgagaccaggatggtctcgatctcctgaccttgtgatctgcctgcctcggcctccaaaagtgctgggattaaatacttaccattgtgttgcaattgcctctagtattcagtagtgtaacgtgctgtacagttttgtccccccccaggagcaatagatcatctagcctgagtgtgtcgcatgctatgtcatctacaacactttgtggtgttaatgtgatgacaaaatcacctaatgacacattcctcggaaagtatccctctcgttaggccgtatatgaccatgtatctatagacttgacagacccacaactaacactctctcttgtggacctggcaggtctgaagtctgtaggtccagctccgaggctgtaaattcaggtgggagttgaggttgcgttcttgagtccaattctacaatgcagcaggatggaaactcaagcagggcttctaaggtgtagtctaaaggagaattccttcttcttcgggatcctcaggcttctctcctaaggccttcgtcttagaagagattggcacccacccatattatggaggataatctactttacttaaagtctactgattgtaaatgttaattacatctatacaataccttcttcacagcaacatctagactggtgtttgaccaaacaactaggcacagtagtctagccaagctgacacataaagttgtcacacctgcacactgcagtgcataatggggtttaaattcagacttgtttctgagcacctaataagtgccaagcatggtgctatgtgtgctggagacgtgagagtggatgccttgcttctgttagcaaggagtcttcagttggaccaaatcacaggggaggtcacagcatctctaagtgagtaaaggctgtcgaaagaatgtggagaaagacttcaattgtcagcccaaagaatctgggctaaattccccagatctggagaaagataggtgagagccagagaaagtagggaggcaggggaaggaggagcatcccaggcagagaggaagcctaaagtaaaacaacaacaacagcaacaacaacaacaacaaacccccatgagcttaagaagctgaaataaattcctgatgggtagaaaacagaatgttagaaggtgaaggttatgggcgtgaacagatgcggccagagggctgtgcttgggtgctgactgtcctgtgcctcctctgagatgttgcagaagtcaggccttagtttgagagcactggggagccaccaaaggctgtttagctggagagtggcatgatcagacttgccttttcagaagagcgctctgatattttgtgcagctctgctattggaggtggaggtcaggacctgggcagttgaagaatccctgtgagaatggccagagttaggataatgagaggggcagaaagcacaatacacttaagagtgcaaatcaatgcagatggtcttcattccatttacagatcactgctggggtctgtgtagatcaacaggcagaaacaaactttcaaatttgtcatcctacctggggatggaattgacacccttacacgtgcgtagcatctctaattgtctttctaccagccttccttctcttctccccatctatagttctggttagatttagtgatcatcgtttctcaaatgcttgatgtctaatccagagcaaagtaattctgttctttttaagcacttcttgtgaattagttagtcaccaaaagggaggaaaggtagacgatcatgtcaatgcaaactgttctgcattcttgaatctttgcagggctgctcacagctccaggagaaccccttccccacctcaccccacccacagatgctagaatcttccctgcttacccctcttcagcagcccctcgtctttcattgagaagatgaaaattggaatgaattgtaattgaatgttattcaacctttccatattaaagtgaacatgagatcaaattgtcgtttttcccaaactttatgtcattttgtattagattactttcctcatgccaggacctagagctcatatgaatccaaaatggaaggaatctttaaattttgccaagtctataatgtgaagaaaaaagaaaaagacctaagtgaggtgtatgtgaacgtgaatgaaaactccagctttgccttggcatcaggttgaaatgagctcagcccacacttggcatttgggctgctcatgtcctgaactacacctcccaattctgtgaattctaccaaaccagaaacatgatttgccagatgcttcccccactcactcccaatgtgtgttctttgtatgaaatggaatccatatgtttcttacgcatttacacttaaatcatcaagatgttactcagtgatgcctctgtgatttatagatctttcagtctttttttatttgaaaaaggaaaatcatattttgtaaagtgtagacttgaaaccacaaatttgtacaatgaagaaaaatatacatctgctgttttctttctttttgcttccaagcttcaaagggggtattgccaacttgcaaacacatgacttaccagaagcatctacaccagccgtgtgggcctgagtctccagctctgtcttattactgccattgtcccatgtcatgggagatgtgtgtgtgtattagtttgttttcactctgctatgaagaaataaccaagactgggtaatttataaaggaacgaggtttaattgactcagttctgcatggctggggaggcctcaggagacttacaataatggtggaaggggagcaaatacgtccttcttcacaaggtagcaggagaaagaaatgcagagcaaaggggaggaaaaccccttataaaaccatcagacctcgtgagactcactcactatcacaagaacagtatgggggaactgcccccatgatccaatcgcctcccacaaggtcccttccccaacacgtgggcactacaattcgtattaaaattcaagatgaatctgggaattggggctcatgcctgtaatcccagcactttgggaggctgaggcaggtatatcacctgaggtcaggagtttgagaccagcctggccaacatggccaaaccccgtttctactaaaaatacaaaaattagctcagcatggtggtgcatgtctgtggtcccagctatctgggaggctgaggcacaagagtagcttgaacctgggaggtggatgttgcagtatgccgagatggctccagcctgggcaacagagtgagactctgctcaaaaaaaaaaaaaaaaaaaaaaattcaagatgagatttgggtggggacacagagccagaccatatcagtgtgtgtgtgttggggagagcaggatagagaaagggagaggaaaaggaagaaattgataagaaggaggaaaaggagggaagatagtaacaatgtttccaagtaacaatggaaagtggaagagaagaattaaaaattttggaacgtgtagaaaattgatatattcaaaggtagaggaaaagaaaacatccttgtcaggaacagcataaggtggccaagtatttaatcacccactcattagaaagatatttgcatagtgacatctacgtactagagtgtggcacaataaagatggatgcaaattatctgacagtcttttgatggttgtctgctgtggtttggaaatgtttcccctcaaacctcatgctgaaattcaatctccagtgttggatgcagtggggtctaataggagacgtttgcatcatgagggcatatccttcaggaatagattaataccctctttcttcaggggtgagtgagtcctcacttcattagttccctcaagagctggttgtaaaaagaacctgatgcctccccaccattcttcttctcttgccatgtgatctctgcacacaactgctctccttcaccttgacccatgactggaagaagcctgaggccctcaccagttgcagatgcccgatcttgaactttccagccagccagaattgtgacccaaataaaccctttttcttgataaattatccagcctcaggtatacctttatagcaacacaaaatgcactaagacactatactatttctcttccacttgaatcttagctggcctggggctactttgaccaatggagtttggtgaacgtgatgctatgccattctggacttagtctttaagaggactggtaccttttgcttgggctttggcctctgaatcaggctgtcatgctgaggccatgtgtaggcctagtcaacaagcccatctatgctcccagatgacggcgtcagctgccagctttgtgagtgcgccatattggatgtccaccccattcaagccttaagatgtagagattgcattagcatcttattacccacttctctgaagctcaaacatggcttttctggaaaatctttgtaacattagtgatcagaagtattttgcttatagtctggatttcttaaaatgaaacttcggaagtttcgtgtcatcatcggcatgcataaatgacgtacatttttccaggctgttagtcttttccttttaatgactccatgtccaagtaacaatcattctcttcttagaaactcttctcatttgcactaaagtgattctattcaagagagctttgccaatatattttaatataacccttacacttaatatctaactagtatgtatctgtctgtttacctgcttattcatccatctcatgtctcaaatttcaaatacatctcctatatatatatgtgtgtgtgtgtgtgtatatatatatatatataaaatacacatatgtacatattcacacctcatattttaatttcatagtttcttgaatggattaatggattcagttatttttgcctttcattaatttttctggaaactagctttgttttgttctccagattccttttctttgactttgatataaatctagagaaaagttaccagtgacttattaaatattgacatcccccacctacattgattcctatacttttctttcttcccgctaatttttgagggataatgataatgcctgccattttttagtattagtatgtgccagaatgtaggctaatgtcatcacaaagttatctctttcaattctcctaacaacccttagaggcagatattatttttctcattttacagtttgggaagctgagacttagagaaattcagatacttgctcagggtcacatagataaagttagaaccacgatttgaatccagatttatcttgtgagatcataatatcctgccttcctgtcttcttatgtatactgactcacacaaaggaatttatttggtcattcatccagtcgtctcagaaattcctcagtcatcttctgtattgcatagtttagctaagctatattagatgaagggccaataaaaataaataagacatgttcatgttcgcaaggagcttttctgagcaagaatctgagccttgtttaattttatcaataaaatgggattctatatatttcttgcaatctttaatgtatgaatcaggataagctgtgttatgatgcagtaacaagcaacctcatgatttcaatgatttaaaacaaggttaatttattgcccatgctatttatctcctgaggcttaggaaggaattctgttccatgttgttctcattttcaccctaaaatgcaggacagtttagaccagtaatggtcacagtggcagaagaaaataactctgggggtctcaatggggggctgatatagtttggatttgtgtccccacccaaatctcatgttgaaatgtaatccccaatgctagaggtgggggctgggtgggaggtgattgggtcatgggggtggtttctcatgagtggtttagtaccagtactattgttgcgagtgagttctcatgagctctgggttgtttaaaagtgtgtagtacctcccccctctatctttctcctgctctggctgtaagacacacctgctgcccctctgcctttcaccaagattgtaagtttcctgaggcctccccagaagcagaagctgttatgcttcctgtacagcttgcagaaccatgagccaattaaacctcttttctttatcaattaccaagtctcaggtatttctttatagcaatgagataactgctaatacaggcactttacttatactcacaatgcattggccagagcaagttgtatcccaccacagaggagccaggatggggaatcctctagaaggtggaagtgccagaagaaggaagaaccagaatatctggaaaccagcactaaggactaccatatatatgataatttaagaatttatagtccaatatatggaaaaactttaaaaacagaaaacattttgtgcctgaaatattatcagtggcatgaaattctatggggaaatttgataattctgagattttttttcacattccttctttcaggctatgttaaaggggcaaaaaaggatatttactagaaaggttattatgagtcctttattttttgctttttcaatctatcagacactgcttcagctaacagctctgaaggaccagccagaggtggacaaaacctgctatcaataacaaaacgaaaagctgagtagagtatgcacacatacacacacacacacacacacacacacacacacaatctgagtaaagactcactaaaatggactagatttgagggttcagtatcttaaagagaaagcctgctcattgagggaaagagaaacctgccattctatgctgattttcccctaaggctttttcctgtccatatcctgggcaaagaggctgagcaagtgagtcaggaataactcagtggcaaagaggaagagactctgagcagagcttttgtgagtctcgtggccccagggagacaaaaattgatgttcagccctgctaaggcaaccaggacttgaggggccaaaattccaaaggaaagggaagcagagagaaatgagaccaacaccctgagctgcttttctcgtaaagtttttggttgattattaaattgttcctgctgaaaggtagataaactgagtagaaatcagttgctaagaggccaaaaacttgatgcagaattcttggatatctcatgatactgcagtgaaaaaaatgtggttcaaagcctgccaaaggagaagagcctagttattaacccagctgaaacccgtgaagtacagtcagacctccctaatggtgggttctgcgtctatggattaaaccaatttaggactgaaaatactcaggggagaaaaaaaggtggttgtttgtattgcatatgtactgacctttttttcttgtcattatttcctaaacaataggctataacaactaactacatagcatttacattgcattagaatttataagtaatctagagatgattatatatataagaggatatgtgtgggttatatgaaaacactataccattttacaaaagggacctgagcatctgtggattttggtatttgcttggggccctagaaccaattctccgtggttactaagggctgattgtactatatttcaggaataagggcaagccagaaattagataaagccttgtaagactaaaatccaatttgaaaccagctcaatttctgattggattaagggatctgcctcaagaagacaaagaaaatcctttttgaaattacataaaataattcagaaattttacatgatttttcatagtgtttaggatttaataaacagtaccaggcatatcaacaaacaaaaccaagaaagaagaaaaaaaatgaaaattacaatatctgatttaaccgtgtcacatatgtgattactaggggatcacacagctggagagcagatttgttgtttagaatgtaggccagtaaaaaattttcaagctgaggcagagaggaaagacttctatgcaacaaactatgaaatgcttttgtgggaaagtaaaaagaacataaaaaagaaaaataaacacaagaaaataaataaataatttccatgaattagaatattacaaaaatagtaactttccctaaattgaacttttgattcaatgaagtctaaatgagaatcactacaagtttgtatttttgtgtgtggaaattgagtagctgatatttaaaaatgtaggcagaaatgcagaggatcaataagagccttgtttatctccaagaacaaagtcggaggatttaaatgaccagatttgaagctgtgatatcagtacaaaggtactgggtaagttagtataactgcttttgggaaaatagatcaatggcaagaaagaaaaaaaagataagagaaaaaaagagaaacaaaaacatccagtgggaaaagaatgatttttaaatattcataaggacagccacattgaaaaaaaatgaatttcaaccctagctcactccatacacaaaaattaaatgtagatgggttgtagatctacatgtgaaaggttaaattaaaaagcttctagaggatacacaagataatgttcattgccttcatgagctaggcaaaggtccttaactaggacacaagaagcattagtcattaagaaaatttgatgaattgaatcacattaaaatgaagaatttctgtttatcacactgacaccattaagtgggtgaaagtgcatgtcacagagtgagagtgacaagggactcatgacaaatcactaagaaaaagacagacatccaaataggaaaatgggcaaaaacgttaaacaggcagtcagaaaaagaagctatttaattggccgataagcaggtgcaaagatgctcaacatcaactgagtaaggcaaatgcaaattaaaattaatagtggaactgcatcactcatctgccagaatgactaagacaaacaaaacttacagcactagtcagtgttactgaggaatgctcactttcctacagtgtggtgggagtgtaaattagtactatcatttttgacaaaatgagtgggagtatttactgaagttacacatacacataaactttgactagaaattgcactctcagtttatacattactgaatcgcagatatgtgcagtaaatgtcatgtgtaaaatattcatagcagtactattctgaacagccccaaatctccatgaaaaatagaatgaattgtgtatttatacaatgggatgccacatagcaatgaaaatggataaatgaattcttactacacacaaagtgaatgaatatcacaaatcaagtattgagagaaaaaggcagttgcaataaaaagcacggactctgtgattccattcatatgaagttcaactggaggcaaagttaatctgtagtgaaaatagtcaggttggctgttatctttggggagtagagggaggtagatgggagggacacaaggggagttttggggtgctgataatatttcatttccttatttgtagggtggttatgtaagtctgttcattttctgaaaatgaaccaatcctgagagttagaatcagaagtgttaaacttcagtaaaaatgctcacttaaaaacactaaaaattctataggacaaatttgtctaacaattgaaaagcattattcttgtcaaataatttttaccatgctggatcttgagtgagaattcaattttagtgtggtaacatctttttgcaagataaagagcataagatgctgactgagctgtcttctatgatgtaactaataacatgtcagaaaaacatgcctaataaaacaatacttatgattattttgcatttacattttgatttagctctttgttacatataaatacagaaactagataagataaatttctgggctttaaagggaagttggaacaaggggatcaatttgttaaaattgttttcattatgtttctgtattttattatataataaaataataataaggaaattaattcttcataattttataacatatcagtgctgaaagcacgcagtctcattttaatttttctcctttttattcagaaacattgatgctattcactgttgtttcatccccacaataaccgtgtaaagtggaattggaatgaatgactccttttgaaaggtgaaaaaactgtgatgcaggggacattaacctactattccaaaattacacttctagtgcagtgcagaccaagggccagatgcacattttgtaacattgattaaggtctgttttttctaccaagttcaccttcgcctccgctaccttgattttggttaagaaaacttaggatcgtcaatttctagtcaactctggcagagctagaacactgcaaaaaggaaacttgtgtgataggacaaagctgggttgaaatggctggagatctgtattcaggcagggttgggtctacaaccaaactataaggcaagaaatagaaaaaggatagtcaccccaccaaagttttattgactttttaaaacacagaaaatgagaaataggtagaacaagatactgacaatgtagtctcaagatggcacatcgatttcttaaaaggttccattgtttcataaaaccaaaacttaaaatctcctactatgtctctacttctctcctaaaatccagtttttctgagttattcctagcagtgctgccttgtgaaaatgttggttttatgaggagcacaagaaggagaaagattatatgaaggaaacctcaactctgaacagaaactcaagccggctatcaaagatctctcagatgctcaactgcatgaccccgtgactattctcaaaaagccttgacttactgtctttgcacagatccaaactcctaattccccatctgtccatttcagagctccctgcctaccctttaaaacggatggaaaatcacgtgattgtaaatcacattctcatttgcattcaatgacttggtgaccacaagataaactggttgggatgttttgggttcattcttgggatactttgggttcattctgcatgggtgcaaaaaatactttgaccagttaggactcccttcccctttttcctgacccaaagggtctttttttttttttttttttttttctgatttttagttcttattgtcacccatttgctccagagactggaactaatctattatcctgtctctaatacctgttattttcccactagtttccatctcagggattggcatttttgtccggaacccaggatctttccctcctacatattctttctaacttctgtcctctttccacctttttgaagagcctcaggggtggggactgcatgcacaatcatgtaagctcttgctaggttctgacctcataagtggacccagagatgactcccattgaaatcctctgccagaatcctgatataattttgttatcttccataaagtttgggggtagatggttttacctttggtgcaacagatggtttgtgtcgtgaaggacccaggctgtttctattcttttttctctgtgatcttcgaccagttggctttttctcttcatacttgtcacctcacagtcataagatgcctgatgtagctccagatgacggattcttattccagctatccaagcaggaaggaagaaactgacacaaaaggcattttcctaagctggcttttgattcaaaaagtgaagccctttttgtttcattgtggagaactaagacatgttctcatctcttgttaatcactggtgaaggagattaggatttccatggctggttctggccaagcaggatctatcctgacttcagcatgggcctagttcctggggatgaaaggacttctctttaacatttggaatacaaaattgggaggtaactgctatgaggtaaacatggaaccattaaaccaatctaaagttgggctttgcactcaggaactctgctcctagaaggtaggttcaactctccatatgcttatttgcccttggctacttcccactgttaagtacaaaataaacactgaatgcatgcatgcatcatgcatgaacgagtggacacgagtgagtcaacgcatggatgtatgagtgattgcatgaatgcttttctcccttgcttttgtcagacttaccagaaccttcctgtttattcccctctgtggaggggctactttgagttttattgtcacatctgctcatgtattttatcattctgccttctttatttataattgtaaactcttgcacttccagaaagcctgtctctctcgtgttcctttttctgaggcaggctactcctcatcaagtcccttccctttcttcactgctcctccccctcagcagtgttctcctagctggtctgcctgccactagtttaacgcttatttttaaaagtcatgtttattaaagtgtaacttaagtatgttaaaatacacttatttaagtgtagagttggatgagctttgacaaacagctgtgaaattatcactgcaaacttgatacagatcatcttcaccaccaccaaagtctccctttgctccctccagcttcttggtagtcaatcctctcctactgccactggcacttgaggaccactaatctgatatctgttcccatatctttgccttttccataatgtccataacatagtaaggagcctttcaaatctaccttctttcacctagcataatgcagtgagactcatcgatgttgtaacatgtatcagtaattgtttctttttaattattgagtattccattgtatggatataccacaacttgtttattgatttaccagctgatggacatctgtatcatttctagtttttgactattatacataatggtgctataaacatttaccaacaagtctttgtgttgacatatttttatttctcttgggtacccatctaagagtggaatagctgggtcatgtggtaagtctacatttgtctttttaggaaaaggccaagctgtttgcaaactggatattccattttctatttccatcagaaaatttgggggttccagtttttctacattcttttcaacacttgtatttgtctgtcttttttatttcagctgtcttactggatatgatgtagtatttcactgtagttttattttgtgttttcctaatgatcctgatcatctttttatgttcctgcacatcctctttggtgaaacgtctgttcaaatctcttgcctatttttaaattgggctatttgtcttctaattatgagctgtaagaattacttatacattctgaacacaattcttgtatcaaagatgtgatttaaaaatatgttctttcaatctgtggcatgtccttctatattcttttctctctctctctctctctctctctctctctctctctttctcttcagagatagggtcttgctctgttttccaggctggagtgcagtggtacgatcagagctcactgtagcctcaacctcctgggttaacatgatcctcctgcctcagcttcctgagtacgtaggactataagcaggcactaccatacccagtgaaaattttttaatttgaaaagaatttatttgaaataaagtataacaaagatttatttgtacatttcaccaagagttggttgcattttcaactccttttccctaaaactagatgactttaatgtaggtagtttctttttaatttaatttaatttaacttaatttaatttaataaagttccaggatacctgtgcaggacaggtaggtttgttacataggtaaacatgtgccatggtagtttgctgcacctatcaacccatcacctaagtattaagccccacatgcattagctatttatcctgatgttcttcctccctctgcccccacaacaggccccactgtgtgctgttcccctccccgtgtccatgtgttctcattgttcagttcgcacttataagtgagaacatgcagtgtttagtttctgttcttgtgttagtttgttgaggataatggcttccagctccatccgtgtccctgctccatctggggacatccatgtccctacaggataaatagctaatgcattgttcctttttatggctgcatagtattccatggtgtatatgtaccacattttctttatgcagtctatcatcgatgggcatttgatacttgattaatttttcaacttcttgtagagatgagatctcactatgttaatcaggctggtcttgaactcctggcctcaagtgatcctcctgcgttgtctcccaaagctctgagattacaggcatgaaccattgttcaggccccttctatttccttgtgttgccttttgaaaaagaaaagtttaaagttttgatgggaagagaaggtactggctgggtatttcttcctctctctccacttgagtggcagctctagccagggctgcttctaccccgtggttccaatccatgggctctataaactagattgtttcccttttctcctccaatctcaggctggagtgactcctttatgctcatctctgggcagtctggtctttcccttgaatgtccacttctttcagcaattctgcagttctgagtgacataatactgctgccagatataacatcttaaaacccctgttagcgtctctcttttgcaatattcatcatgtctaatttttttataagcccctaaaggcccttagtaatctaactctagataaaccactatattgttcttttgcacaccttctcctaccatgaaatactcttacctttagtgtaatgcataacccacataaacttgctctcctcttctagactgtggtttagttccacgatggcaggagtcatctgcaactcctgtttttctatctccagatagcagttccatacatctatgatttgcatcatacaacaggagcctactgctcaccagaagggaatgtttagtgataacagtgtaagaaatgtcaaggtatgtccaagtgaagaaaaggccatttgtagactcaatcttgttggccagtggcttatccaccaggaggagtttaagacagtccttctattgtcagagcacaggttgctgctgtgggcagaaatatctgcagggagtgtatgctcagagcaaagtgtggcatgtgatgtcaacaccatgtgaagcttctttgctattcttgcttcatctaccttcttcccccaccctctgcccacctgacccctacacatattcacacataaacacacacatgcacgcatacacacagtttttctcttctctacctagaaattgctatttacttgctagggtctgaatgcttgtgtacctgcaaaattcatgtgttgaaatcctaagtctcaaggtgatggtattaggaggcagggcctttgggaagacactcggtgtattaggctgttcttgtgttggtataaaaaatacctgaggctgggtaattcataaagaaaagaggtttaattggcttatggttttgcaggctgtacagaagcatggtgctggcatcggctcagcttctggtgaggcctcaaagagcttttattcatggtggaagatgaagcgggagcagcatgtcacctcatgagagcaggagcaaaagagagaggagggagatgccacacacttttgaacaaccagatattgtgtgaactctgtcatcaccaaagggatgggctaagccatttataaggatccactcccatgatgcaaacacctcctaccaggccccacttccaacatcagggatcacatttcaacatgagatttggaggaaacaaatatccaaactatatcaccaagacatgaaggaagagctctgaagttagtgctcttaaaagagatcccagagagagccttgcttcttcgaccatgtgaagacacagcaagaaggcaccatttatgaaccaggacataaaccctcaccagacaaacatcctggtgccttgatcttggactttccaggctccagaaccatgataaataaatttctggggtttaaaatttacccagtttgtggtcttttgctatagcatcctggactaagatgttactcctgaaaattcagactactatgttattccctctgagaaggttccgctaagcataattaatagttccttctgggttcctatgagaatgtgggcatattccttacaggcacttagcacactgaatgtaattagctgtgtgtctgtctccctcactagacagacagtttggttttttaggggtgagaccaccacgtcgcataccttttcatcttcagagctggcacagaaggatcttagcacatatttgctgagtgaatgcaatccctttcagtctgatgtattttcatgcagagatgtggtggaaaaaaatgtgtaaaacctgaacttggttctgtactgattattatctaatttctgtagaaatgtgaggtgaaccaggtcataacagcccatttcaatgtatcttttggacaagggaaacaatttcccaaccatttgcagcttgttctattgtttccattagtcatacaaaccttccctcacccttcaacataagcatgtcaagatagctgccctccaaattttattttgagcaaatgtcttatttttagagctttatgcaatcatataaaatcctttaatttagaaattctggctacactgggcacactgcctagtagccatgctctgcaaggagcagtaaaaaaataaaaataaagaaattctgcattctagaaaactcctccccatagctaaaataaatataaatttgaataacattttcagacttatctttctacagtcctacttcactgcttccttgagttctctgttacccattgcaatgcctaccaaagtttcttgatgttcaactaaatcttcatgctcataaattatcacttgatattcaactcttagaggatacagaacaggagacacagtttgctagcctagtggcattcagcattcctgttagttgaagttcttgcaacagtcgtctacacagcagggagatgaatccacattggctcccatgaaatttaccctggcttccaagctctataccagcatatcttgcaagatctccagaggtataactccttctacgatccacttaaggattataagagtcaccacactcttataattcttctttagggaaatctcaaaacagggtaccctaattgggttcatttgtagtcttccccagtgcagatgtgagctacccatcagggttatttttatgctaatgaatgtcacccaggagtacagctaacatcatatcaggtaccaggagaacacagctaatcaaaggatgaattctgacacagaaggtgagaaggtttagttggttaaccctttgcccacatccatatcaggtaaaaaacaaatttagcacagcattcaagagcatccacagccacaggtccaggaggctttctgggtttattcaccctcccccctcatcttaagcatcagttacatctaatgtctcaaccctatctggaaacacattgctcatatgtcttacctcaaaggctttcctacttataaagtttcctcctctgccattttcactctctctctttttcaactcatatttccttgtgaagctcctaaccatatgtgacccacttctgctaaatgttctctgaaatgactccctagacacagttagtcattctcatacatctgcccccaatgacctttatttacaccattatttaaaatgaaaaaaagacaggaggaaagaaactagatgttatcaccttgaattttagtgatttttttctttatctttgaatcccatacgtagcagagtgtgagcatgtggtcagtaccctacaaatattgttgagaatgtcttggaatcatatggatcccaataatctcctagaaaatctatgaaccattttaaaggtaaaacagccctggttcacaatgtttcataaatgtttacaataatagcgagtacttctggagtgcttaatttctggccacagtttatattttcttggttaatccttggcatacccctatgagatatgcaccgttacaggctccattcaactgataaggacacttaggttcagagatgttgagtgatttgtccatgatcacacagctgtcagaagtggagctgggactccaacccagggaggacgtctacagagcctagttcacacatctctgttcttccatccttaaaccttgtagaatgcagtggaggagcaaggcaagctgcgggccatggggattctttattctgattatctgaaaagaccaaagagtttagactgctcactgggcttcccttctccccactgtccatggagaacaatgtcaaggtcagctttaaatttcaccacgtatggtctcattggaacaactgatgagtagaatagtccatttattgtcttatttgagaactctgtagagattagttttataacattagtaaaatacacctcaacattttgactttttgcctcaaagatcattttaacaatttgagtcactgtgatgggagtttaatatttttaagcagcatattgacaagtgtttcatacacaaagaagccaagacagaattgaagcttacagtgtcagggagatagtttgcctactgttaatatttgtgtcattgggtttgtaactttacatatgatcacaaacgttatgttacatattaacataaacatcctcaatattcaaatctatctgtgtttcatttgcatggtgtaagagtgatagcatctgtcacttaaagaggttgcctaacagtctttaatccaaaatagaaatgtgtgagattttatccttttctttgatgctttgtaattatacaagttatattttatccaagtttatatccatcaatttttatctaagtttatatccatcaggtacatcaaaataaaaatattttaattacctcttgaaataatttgtccaagtcaataagtggcatgaattacatcactgaggccataacaaggatacacaaacatggcagaatcacacagattgtttgtctacacaaacaagatggtagaatccatcctgttactgagacttttccagaaaagcctattatttctgcaagcagatgtggtttaatcttatttgaatggtatttttgatataatgtgcctgggaattaggtaatgaaattggctgtgtgcattcatgtgttcatttgttcaggcatgtatagagccttctgtagtgagctttattctgcaggatagactataatggtactttcttcattgctacagtcttggcttgcaatgcttttttcttgctgacctaaaacccatctctagacctaaggaaatttattttctaacaccttgagatagtaatatgctgtgtgtggaggagataagatcatcacttaaataaaagctaacactgagactttctcctccctggccatctgcacattggacaatacctgactccaacctaaaataatcaactccagagttatacttaatgcctctggcaggcctgcctattgccagagagttttgggcctaggaataaaggcaacaaggattggccatttctggaggtaggaagcaaatggaaactcataattttcagatggctctgcatctttggggtaagaactggatgtttggggtgttttatagactatatttatttgtccatctatagctccctaccctccatctccctctctctctctcttcctctcacccctcccatctattatttatctcattttaggtcattcttaacatagctgtagaaaaagtaaaccttctggtgtgttttaattctggatccctcagggtgacctttggtctttgggaactgtggtttatgctggtgctgagggtggccatgcagctgtggagacagggagggatagagggggtgtaaatgcactttatcttcatggcactccatcttgtgactcctggcatgtcacagtgtgtactgcggtcccatggactcaactgggcttttataaataatttgcattgttcatttagttgcagtttaaactacaatatatggaggtttaaagaaaaatcaagttaccactggggtgttttgctctgtttgcaaataaacctctcttcctatatagaggaatataaaaacttaacccaataatatgatataaagaaaaaactgtagccaatatgtttgggttagattaaataaacaagtgtgcttattacacttttactatttttttttttgtggttttattataaagtaagaaatcccctatcacaaataataccttatttttatagactcctatcctagggctgtcaaagagcttaattccagggatgaaacttcattctcacaggactcacctggggaaaatgtatatttaggccttttaatctccatgtctcaaagcataaaactagtgatgccatagattagctcctcctttccctgaaatgcaacatgcactgtacatgcatgcgctgtactgtaaaggagcatcacatgcatgtagagtgtgcagggaagacaggaaatgaaaatgcatctccctgagctgtagttggtttaggtaagagtttatggaaaatacgattattgactggtatgtatttcaatgtgtgttaggtggagttgctcatggactcttagagttgaagtggaacagacaggtctcccagctctccagctctgttaaacaagagaaagatgcttgtgatgcctcagctcaactgtaatgaggtcaactcctatcactgccgtttcatctcagtgttgattcagaacgcttccagttaagtccaacgcccaaatcatcctcacaaattccgttaagccacagctccctcatcttactctacaccccctcagaggtttattctcattccacccactcttaatttcccgcggtcctcccagaacttcggttcctccatttgctttcagtccatctggatccacctggctttacttccctctttatccagcccggcctccttggttgccagggtttgtcagttctcactggtaatctctctccctccttgtctacttgtcattcagagctggcaaaattccacctgggaacccatacatcattggccttctccactctcaagcctgggggctgagcccagctggagaaaatcactaagatccttcaaccagtcccaccaggaagctcccgcggctgttccaagctcttgcctctctcccatgctctgcttcactgtcctcctgtctcacagcagattgtccggcctcagcttcctgcctcaaatgcccagatgaatgcatctgtacccagacccgtttttaattcctgctccttatttcctctctctcctgccaatcccatcagccatgctctgacctgctttctctcctgcttcctccagaccttgttccctcaaccctcttccctctctgcagtatcctcatctccctctctactaggccttccccttagcatagaagcacacttacatgtttcctctgtgtacaaataaacatagcaatgagttttagaaaatgttccgttcaacacgcttttcttgacgttctcaatttcattgatttccaattcccccaactccaggcacactctcctagggccacaccctgcatattacctggaattcttccttctctgccaggatccctctcactgcccataatattgtgttatcttttgtcatcattctgtgtgcctactacacctgttctttgatctcttaggggctccgattgctccatttccttgttgccttcattcctattgcttagtggcctggatctcatggctcttgccttgaagccatgaagctcatggcttcagcctctgtctgtctacatcttctttcccattctcatttttccaccacactcactggtaaactccatccctggattaatacaaccatccacccttcctacacctggactactggtgaagctcacataccatgagggttggtgccctatgcagctatagcctccagcttgaactggaagctcagctatatcccactctccttccacaggtcccataataccttcctcttccattcccctaaatcattgtttctctacagtcttcaaatcccccttggaactatctcttctctttcttttagggggtgacaggtcttcttaatactccaattaatgaaaactgactcaaagtgacaccttcagtgctctgtctcaagcactggttacagatggacctactctcagagccctgaaatttccatggaaaaagtgatacccacttctcacagctaatgttcccacatggactccagttcctatcccctacttgcatccttcagggtcatgccttattaatcatctcattatctttcatttctagtaactttcgttctattgcctcttccctctaagcacatataataactatgtttaaatctccatccacaaaccaaattaaaaataagaacaaagcacaaaattcatccttgatcttatatctttctatactgtccactttctcttttgcttccatcacaggcaaatttttggaattaattaatgctctccctcatctcataaaccttctggggaccttgtttctgttccagcatgccactcaaactatctttaaattactgggactttcctattctcatgcacatttgtttcatgttcttcaacttctacaggtgctttgttgggagaaattatctcctagatttctatgatagtttactccaggttaactctttcctcctcccaccatttcttctcatgatcttcaacaggtttctcttcctctgcttttctttaaagtgtttctcaatccaagagccctatcggaatcctgcaaaacctaccactgagttctccttgatgaagtgtttcctaaatgaatcccttaaccaattgaactctctcatttagagatacccaatactatggaaatttaccatcctgatcatcatttgttctttgtatactttccttatctggcccatgagttcctcatgagcagggtcatggccctatgtctggttgtggcttacagagaagacagccagtcagtacttgtttaatgtaacccagttgagctgttatcctttctctctgttgtctgtttacattatatattagctgcccttacagaagatctgtcctgcctttgttcttttacttgactctcattttaggtcttagcaaattttgcaaacttctttgaagcacaaagattctcaacactatttcttacttgcatttatgttcatcttctttcctttttttttttttttttgtacaagtgttcttacgtctgactttaccagagaatttcctgtttggctacctcttgagatacttccccattttcttcccagtcgggattgtgctatgaacaaggacccttccctctccagacttgtttcatgctcacgtcttagaattccaccaatctttgctctaagcttttagagttctgcctcctcaaaaggcggtcacccacctgacaatacccagctcacccatggttggctgtgggaggctctagagtaacctgctccttttatctccagggcccccgtcacttcctccttggttagaatagatccagagaagcagctctgcctcgcttcctctttggactgaagtcgatttctagcagctgtccctgtgggctccctgcacccgggcccctccctctgcagtcacccaacctctctggcagcatctgtgctgtttgatccatgcctggaaaacatcagtgcttcctccatctggatgggtggtctccagcatcgtcccactctccctccctcctttaatcttcaaccaaactctctgtgcacattcttccatcatggtcacacatttcactccaggtgtatatggctttgactggcttagctattgatcctatttcttttgaacatggcatttcctagaccttggtgttctaggccaattaaaaacctgcttccttatatcctggtgagggcaaataatggtgtttaccttcctgcattaatatccaacatgcattttatttgttaactatattttatccctactcatttggtacatgaacataatcactcattctgtgcctcttcaagttattcctgactgtgaattacttgacaccactagtattatttttctctgtaaactttcccaatatttatttgatactacacattttgcagaacaaagcctcgattatttttattctttattttttaattttgacttttaaagttccttattttctatttattattctattgttctatacaacaaagttaattattactgttaacttttttaaaaaaaaacttttaagttcaagggtacaagtgcaggtttgttacacaggtcaacttgtgtcataggggtttgttgtacagattatcttatcacccaggtattaagcctactacccaacagttatttttcctgattgtctccctcctcctaccttccaaactccaaaaggccccattgtgtgttgtttctttctgtgtgtccatgtgtcctcatcacttaactcccacttataagtgagaacttgtggtatttggttttccattcctgtgttagtttgctaaggataatggcctccagctctatccatgtccctgcaaaggacatgatcttgttctcttttatggctgcgtagtattccatcatgtatatgtaccatattttctttatccagactattatttatggacatttaggttgattccatgtctttgctattgtgaatagtgttgaataacttagttcagccattgtggaagacagtgtgacatttcctcaaagacttaaaaacggaaataccattcaacccagcaatcccattactgggtaaatacctaaagggagaacattattttttattactattattatttgaccattttgggaggttatcttcacgatttatacatgattttcaggaacccctatttcagtacaataatttatgatgcagaaaattaaatcccgtcctgaggataatagtaatagtagtattagtggcaacagcactagcaatagtagtagttattctattaaatatccaatacatatttattaagcacctattatgggccaagcaccctgttatatgtaggggagaaaacagtggaatacattcaaactgtccctgacccagtggagtctgctgtctcctgaggggctcacatattcacatgaataaaaataaaagttagacctatggtacaggcatggcagaggctactggtcaccccccactaacccaatccatctgtagatttttaggggtagaacctctgaggtagctggactcatggctgctcagccagagacagaggccatatctccctcttaactgagagggagcattctatttaataagcacttctactgcactccctgaccgctagccactgtcctaagtcctttaagcatactagctcgtcttatcttcttgagaacactttgaggtagacagatgaggaaacaaaggaacagagaggttgaatattttaagtcacacatctctttttcttagagatgaagtctcactctgttgcccaggctggagtgcactggcataatcttggctcaccgtcacctccatctcctgggttcaagaaattctccagcatcagcctcccgagtagctgggactacaggtgcgccccaccatgcctggctaatttttgtatttttagtagagaagaggtttcaccatgatgaccaggctggtctcgaactcctgacctcaagtgatctgcctgtctcagcctcccaaagtgctgggattataggcgtgagccactgcgcctggcctaaagtcacacacctcttaagggaagtagctagagtacaaatccagccagtctagcttcagagtcaatgctccctgtgtctatgtataggcatagatttttcaatatcatatgtgtgtgtgtacatacaacctatatgtgtaaacacaaacctgcagactgtgtgtatgtgtacagaggtcacaccagtccttcaattaattaatttatttatttatttttggagacagggtcttgctctgtctcccaggctggagtgcagtggtgctatctcgactcactgcaacctctgcctccagggttcaagcaaattcttgtgcttcagtgtcctgagtatctgggactacaaccaggcaccaccacgcctggccatttttttttttttttttttttgtattttaatagagatgggtcttcaccatgttgctcagcctagtctcaaactcctgagctcaggcaagccacccgcctcagcctcccaaagtgctaggattacaggcgtgagccaccgtgcctggtagtccttcaatttaatactgcaaatttaaccttgcttcactgtacggcatcagctccttggacatctacacggactgtggacaccatttgatccaatgtatagctagttctccccatggctattcaactatacgtgcccccagtattcaaaggacatttggaaactcatctgatatctccaagtgctgctgcaaataagatcctgatgctgttttaggcacctgagtaaagtcaaaatctaagtacaactataactatgacagttttagagagattcttggcttactgctgttgagccacttacacaattctgcagagaataaatgtaggagagagcaacctctttcctgccacctgaccttcacttggtggtcagtcgtgtggagctggacgtcactgtcagcttcagtggagtccaactgctgacagataagtgggagcacatggcacgtgcgagataagagcctataagagcctggcggcctgaaataaatggcaacaacaatgctcttctaagtggtcttccgagaaagccctgttatcatcagcattgttcacacttagtaacaactttccttgaatggggttttcaacatgtttgttcctttcagtctgaattatctgccagggaagaaactctttctaaagtccgtcaacagttgtgagattgggttgaggctctcaaaggagtttccggctgttgtcaacacagcaggaaggggcaaggataaagggtgatttaggagcctgtgcctgggtaggtcctgccagagccagcccagcccagcccagcccagcccagcacagcacagcacagccctgcccagtaggtcacgcgagcgccatcagccaaggcttttggaaaaacctatgacaaggttttcagcttttcagagatgtgccaggactaacgcagtgttactggggagaaattaagaatgtatccgacgtgtgattcccaacttcattttctgcctactcgctttaaacagccagtatacaagaggccactcagccatggagaaagtccctgaaagttctacgagatattctgatcttagtatattgggttcttaatctgaaccatattgaaaattccaccatgtagtttgagctttgcaaagtcaggtcccaccatattttttttttttttttttttttttttttgagatggagtctcgctctgtcgcccaggctgggatgcagtggcatgatctcagctcactgcaacctccacctcccgggctcaagtgattctcctgcctcagcctcctgagtagctgggattacaggcacgtgcaatgatgcccggctattttttgtatttttagtcgacacggggtttacccatgttggccaggctggtcacaaactcctgatctcaaggagtccgcccgcctcgccctccaaagtgctgggattattcacaggcgtgaaccaccacgcccagccccatcataatttttctgtaactccccaggtgaccagtgcatccggcacagtaatgctcaataaacaagagttaaagtgaacggaagatgctaaatgccaccgccgattgtcatctactgatgtatgtttgagagaaatcttacggtgatttcccacagctgtcctggagtcatataaagagatattttgagggattaattctaaatattgggaatggaaagagagaaaagctctgagaaaacttcttcatttcggtgatcaggagaagatgcgtaaagtatcatgacttgcatttttactctctggacgaagttgttttcttattattttttactttcatttgttcattcactcatttactgatccacaggctttggagtcagacctagggctgtaccatcctactgtgcagctatggtgggccattgggcaagtctctggtatctctaagcctcaatatcccaccaaatgtaaaactaattcattcagtcaagagatgcttttaagcacctcctaggtttcaggtgtggaagagagtgagcaagagagacacaggccctacttttgtggagcaactgaacatgaaagtatcaaattagaatataggtttgaagaaatgtggaatgatgcacacagacacaacaagacagaaaatatgaaagggtgaataagaatgataaggactagttaaaatttcaaaacgagagactagagagagaagaaatgtttgaggataaaaggttgatgatttttcagatattaggaaagacaaaggccttaggtccagaggggacatttgtcccctctggatctggagatatttgtattatagtgacattacaaaatgccagagatgataaaaataacttaaaagcagccctagagaaatgacagacatcaaaaggaataataatcagatcaacagaagttttgacaataatggatccgcaaagacgataaaattctaagagaaaataactttgccaagccactctacctttcaaaaacaaggttgaacacattttcatataataagatgtaaggactctcaccttgaaaaaaaatcctcatgaaaggaacttctaaaggacatacttcggggaaaaaggacataaatacagaagaaatatctcaaacctcagatatgatcaagagtgtgagcaaagaaaaattggtagccacgtggataaatccaaacatactttgactgaataaaccaatagtcacattaataacaaattatagaatagaaaacattgtggaactaaaaacctaactaattaaataatggtaatagtttaggtgagaggaagatggcctgtactacaggatggacaacgaagaaaggacattagaaagcatgttagagcaagtattaataaaacctgggaactggagatgaaggtaaagaagagggaggattcagggatgctcaaagttcttttcttgggcaaattaacttctcaagacctcaggttccatattagaatagtgaatggactgcacgaaatgacatagaattatttttattctgctatattaagtgttcaatatgtgccagcaattattacttccacaatattgagagagtgttttgtttgttccccatgggtgagacaaagatgacctgaacatgatctaagtgctgaataagcttaaaatgtggtaaaagaaatacatacactactaagtctatttcaagccagagtgtgatccacatgccatcagggaagagcaaacgttgttttgaaaagcaaaggaagaggagatgatcctgcagtgaaatccggggaagattttctgaaaatgtcaaatggggccctgaagattctttaggatttaaaaatacatagttcttattttaatggtaatatatacctgtaggaaatctgaaaaattaaaatagtataaaaaagaatgaaattacttccaaatcctattatccagaaataatcacagacaacaggctactaggcatctcatcagacttttcaaactctgattctctgtttctatgaaataccttaacagtgaatgttgcatataacatcatcaaatgttatgcttttataaaatttttaaagctctagagggttcaattgtatggatgtgtcatagcgtagtgaaccaatcctggatgatcagacactaattttgttcctaatcgtttacttttgccacggtactgacatgcactttgcagttttacatactaagaatagaagaaaaatgaacaatcatgataggatgtctcaggcatagaaatcaagacaaatagaggtagagtgtgctcaagaacattggttctttccagtttcaccgaaatgaaaagtttgtgtacacgaatgtgtagaaactagataggggaatagtagatgaaactagagcccatcgtgatgggttctgaatgaatgatgtgtttggacatgattaggaaagtaactgggaagttgatgatcagatgtgcagttgagaaagttgtatgtaattaaaagcaatagacagtgtatgtcagttaaaaatgctttctgctgcaagtaatagtaaacacttcaaaaaagtggctaataaagagtgtttatatttttcatataacccaaatggtgacagccagcggtggctgattgggttcagatgttcagtgatatctacagaaggcgccgggtcttcctgatgctatgctctgtgatgcttagagcacattattggctttgtgcttcctggccacaggatgactggtgtagcttcaggcatcatggcctcaaataagagccagaatcaggggtgttgttatggcagagaaaaacctgcttgtgtccctctcatctttaatcagtaccttagtttgccagggttgccataacaaagtaccacaaactggtggcttaaaacagcagaagtgtgttcccgaggctagaagtcgaaaagcaaggttttggcagggccacgctcctctgaaggctctagggaaggatgctttcctacatctctcctagcttcaggcgattgctgcaatccttggcatcccttggcttgtagctgcatcactccaatttccgcctctgtcttcacatggtcttcttccctgtgtgtttcctctgtgtctctgtatgttcaaatctacatcttcttacccttacaaagatgctaaccattggaattagggtccatggtaatctagtatgacttcatcttaacttgattagatctgccaagactatatatatttccaaataaggccacactcctaggtgccatggattaggacttgaacataccattgggggggtcaaaattcaatccactacaattggggaccaaaaattgttctcacaatttcctggtaggtgctccttcatagctcatggccagttctgagtcactactcatccctaggcctggggtgtacccactttctatggatattacgagctctctagttgatacttgacaaaagtcagaattcaaacaagggagaaaaaaggaggagtagagaatgtttgctaaatgggctacaggatctgccacatagagggacaacttagaaacatatattccatatatatgtttatatatggaatattacatatattacataatattacatatatatgtttggaatatatatacatggaatatatatatttcgaaggttggtgcaaagtgcagttttgccattgtttttaatggtatatatatagttggacaagacatagggactgaactaaaacaaaaggcataatatgtcaacaatatttgtggagatagactcaatataccttggaaactacaattatgagcacaagggtctatgtgcggggatgagaccaatctagaatctgggagctacggatctctgtgaccttgatattaaaagagtgaatagagggcaatttggaaaaggtgagaaataattgagctgtagagaaacatatgcatggttaaagatacagttctattgcttttttattagtaatttccatttctagctccacacactcacccatccactcaactgacctaaagtgggaaggatatttccagcctaataaatctctggcaagaacagcagctctctggcaaaatactcagcacctgccatggaaattagaaggcattgggatgacagttgcttttgtttggaggatgaacatcaggagtgcttgagaagtgacagtggaactgcttccctctcaccatgtctgtatttggatgtacatagaatgttttaaccattcctgaggtcccatctccacgtacctgagcctctggggtgcagacacacacctgtggttttttctattagtcacttccttggtaggcctccagctggaaggaggaaaggacaacgttggaagccaaagtcaccgctttgattctggtaaccttgttggagatgctgcactctgaaaacacagtacatccatttccagaaagtgaagcctggaaaattagtgcctaatcgatttcattcataaatccccatcatggcagcttacatgacgttcaaggaaaaacttctcaagcctctccatttaaaataaatgttagcttttatagtaacattgagcaaaagatttatgtccattttcttcacattgtttgacttctaagtgtcttcccccacttttcatccaaggtaaactttcaaaaatgttttccttgaggctgggcctgtaggaaataatacatagtaatcccagtacttttactggctgtgtttctgtcaggatcatctagtaaattcagtgcctttagcaatcttatctcttatttagtaggagattaaagaacacagagccaattatcctcattttctggatgaaaagactgaggtacaaaggagtttgaagacttaatgtggttgcccaatagctagtgccaagtctggggaaaaaattgactttcccatcccctaagatgaaaaggcagcctctagttttcctgtggttgggcacaaacattgaggaagatagttaaaaacactaaatgatcctaaaatgcacatatattgaattgacataagctatgtgcaaatgctgaacacattgtatctaccatgtagaacataatctataaaatttaacttctgttttcccaatctttacctgagtgtgcatttttatattaacatttaggttgggtactttaatatacttgagtttgaacacagtaatatcacagagtgattttttgacctaaaccagaaattatctctccttccagctgagcagctgagcaaccttcgtcttctgtagaagaagggaagaacagtcctcgtctgctcgtttattgagacaatttagaatctgtgttttaaaatggtccatgtatacttgagtgtgtgagggaataaaagtgaattgaaatatgaggaactgagttaacaattgagttcatcatctaggaagattgattcctggatctgccactgcttttctggaggtctctggtggatcacatcacctgctctgaacctgcctttccagtggttgaggttattatgatacaggaggtctaaatttcctttcagctacagagtttgttatgctttggattgtgtctctcccaaattcatacgttaaagtcataactcccggtacttcagaatgtggtcttatttggagataggccctttacagaggtaataaagttaatatgaggtcattagagtggcctctaatccaacacgactcatgtctttataaaaagaaggggtaatttggacatgtaaccatgtgatgacacagggaaaagatcatcatctgcaaatccaggagagaggcctcacaggaaatgactgctgctgacatcttgatcttgggtttttagcctcaagcactatgagacaatacattcattttgttcaagacacccacgctgtggcactttgttatagcttccttagcaaactaatacagagttctctcattctactctgtttaattgtgtcattacacatttagtactagttagtagcatttttgtaaatgtttatatgtatgcattatcttactgaaccctgacattgtgtgaggcaggaattattgtcctaatttcacagggattagacactccattacagtttaaagataagtaaaggcaggctctcatgtaatttgaccaaactcaatgttctgggggcagatctgggtcacaaataagagggctctttccaaaattcatgctgtgtcttctatttcatgttgctttttgaaggatcataagagcttgtgtaattgttataatcagaaaatacatgcttaaaaaacagaaatagggaaagttaaggcagctctcctgagaacttagagaaacactgtctaaaccgaagaagttgcgggtatcatccatgaatggagaaatacaatgggaactcttttctcctcaatatatctcatttgcttgcttatttagcccaatttggctggaaagataatcgttgaggccaaaatccacaagacaaaggaagacacgatctttcagagaaaaaaaaaatattctgagtgaaatattcctgttcgcaaactgttaaatgtgcagctccaaggagcaccctttaatacatcaagaaaggatttattgtcctcacaatgaggagacggggcacacatgctgcaggaagggctgcaggttggcagaatgttctggaaggcaatttggcagcatgtccccaaagcctccataccctttgatccagagttctacttttaggggcttatcctaccaaaacaatgcagtccaaagtggggaaaatatgtgtatgagaatgtcctgagcagctcaggtatctacctcagtggtcagaagaggagcatgaggtggaagaagagagctaggacttgagggtgccagcactgggcacccagactcaggactgactgtcaagcaatcatggtgaatgttgacatgggcacatgtatgtctaataacacgtgatggtgttcatgacatatgttaaatactaacagaaaacatagtaaaaatagtgtatgtcgtatgacatggatatgtgtatctatgtacatgtacacacatgtgcatccatgtacatatatgcacagacatgtttacatgtgtttgtacacacataaggggtagcaggactcaaatgacacacaccaaatgctgactatggttgtccttgtatcataaaaccatgaaagataggtttattttttccattttctttgcttatatagtaatttctttctttctttctttttttttttttttgagacacaatctcactctgtcgcccagtgcagtggtgttatctcggctcactgcaagctctgcctcctgggttcatgccattctcctgcctcagcctcctgagtagctgggactacaggtgcgtgccaccacgcttggctaattttttgtatttttagtagagacggggtttcatcgtgttagccaagatggtctcgatctcctgacctcatgatccacctgcctcagcctcccaaagtgctgggattacaggtgtgagccacagtgcccggccatatagtaatttctaaacttcctacaacatatatttatcaatctagtaaagagaaatgtttttaataaagatttgacctgttaatgtctataatattgtcatggtcattatttttaatttaacgtatcatccaggtcttccaaactgttggattcttagagctaataccaatatttgctaagaacatgaagcactctcttatttaacctgggctgtcagtcattctttctttctttgatgcagtttgccttaacccaagttcagatgacatgaaaagtcatttgtattatgttcttggaagcttggacaattgtattactcacattctacatgtccagggatagctaatggttagtagttttactgaaccgtaaggtcacctctgatggaatattcattgagtactgatactatgtatcttgtctgtattagtaagagttttccagagaaatagaactaataggatgtgtgtttgtatgtgtgagatgtttgtgtataaagagatttattataaggaattggttcacataattatgaaggatgaaaagtccgaaaatctgcagttggtaagctggagacccaggagagctgatggtatatttccagtcctagcctgaaggctatagaaccaggagagctgatggtgtaggttgcagttgaaaagctggtaggcttgaaacccctgaaaagccaatttttcgttttcagtccaaagacaggaaaagaccaatgtcccagttcaaatggtcaagtaggagggattttcttttgctcagccttttttattctgtttaggtcttcaattgattggatgagcacacccacattatggagggcaacctgctctactcagcctacagattcaaatgttaatcttatctagaaacttctcaaaaacacatccagaataatgtttgaccaaatgtctgagcactctgtggcccagtcaagttgacacataaaattaaccatcatattgtccaacatacaaatgtgtctcaatgggcataaactgttgaacccaaacctccttaggggctattaccacttgtcctgttaagctggaagaccccatgggctgacttactcttctgtggccacttcacggggtaggtccataagagacccttgataatatggaagaccaggacttagttattgaaatgcacttctgtatatctgctctgaattaaattatatacagcaaatggactctatcagataaaaattataaaatgaatgctttaaattctccactgacttttataaaatacttctcactctttggctaccaggtgatttcgttgggtgtgtgcacaaatgcaagctcttgccaccattaaattggctattttatatatatgtgtgtgtgtgtatatacatatatatatacacacacatatatacatatatatacatatatacatatatacatatacacatacatacacatatatacatatatacatatatatacatatatacacacatatatacatatacgtgtgtgtgtgtgtatatatatatattctgctcagattcaaattcccaaaagctgaggggtggagctatttacctgctttccccctgggtgttccaccctagacactttggcattaagaaataaatgctaaggtacagagttggttgtttggtcctgaattcaagattctgtcctagctcaagtctcaagtttgaaggatggtggctctctcaaggcagaattggaaccaggaataacatccacacatgggggctaggagaagtgacttggctaaagaagaggacatgccagtagagagatctaacccagtgtccaagccatcttataatcttgccaactctggaaacagccagttctgggtttccaacctgaaggtagatcaccgatgtagaaaatccagtgggctgaggactggagtgtgaggctgtggtcaccaggaatagctgtgcatggatagtaggatccaaggtgaaggctgggacagagaaatgtaaggcagctgtccagggaagggctcaactgtagtatggcagggattcaggtctaaatccagcctagtggttctcaattagggactattgggcaatgtctggagacatcttggggcattacaactgggatgattggcatctaatgggtgtcatcctacaatgcacaagatagtatcctacagtaaagaaggatctgtcctcacatttcaacagtaccgaggtggaaaaactctggtaaccttctaggttgggacagcaaagacctgggcaggcaaatatggaagggcaggaaggagagctgggtctgggagcagatcagcaccctgaaagccaccactggcagccccacatgtggtctgatttgcaagaatgagcaccaagtggcaggagcccagtgctgaaaatggggtcatgatcatgggctgagcttggggttgtttcttgtgaagacccacaagacatgaagaaggaaaatgaaccttaagacatgcctcttgcctcaggcagggatgactcaggttggggtcaaggtgaatggtggcgcatcactgggaggcccattgaggggacataagagaagacatgggcaatggcaatgaggcctgaagtcccagaaaggagcatgcaaagacttcccatgagggacattggaagaacttttccttttccttccagacagcctccccttgcataggttatctgggaaaggaatggactgtggtgataaagagcatgtgctctgcagctggcctgctgggactaggatcctgtctctgttctttgctggctatgtgacttctcataagctatttaaattgttcatgcctctatttcctcatctgttaaatgagaacaataggcctggtgtggtggctcatgcctgtaatcccagcactttgggaggctgaggtgggtggattacggggtcaacagttcgagaccagcctgaccaacatggtgaaaccccgtctctactaaaaatacaaaaattagccaggcgcagtggtgggcacctgtatttctagctactcgggaggctgaggcaggagaatctcttgaacctgggaggaagaggttgcggtgagccgagaccatgccattgcactctagcctggccaacagagcacgactccatctcaaataaaaataaatatatgaaaataaaaaagaatattaaaatagcatctcatagagataatgagagttaaatgagttaatacagctgacccttgaatagcactggttttaactgtgtgggtccacttataggcaaattgttttcaactaaacacaaattgaaaatacctgtgtgtgctgaggactgtcttcatacagcaggttctgaaagcttgactgtggaacttgaatatgagcagattttggtatattgggggtactggaaccaatcccctcagtatacctttatttgcaaagataagggtaacaactatgatatttataaatatatatatatatattgcacacccacccatgaatgtaatatttgtgaatatatattttcatatttgtaaagatgagatgtgataactgtgtttcttagtttctcaaaatagatactagtttattttccacctcttaaaattaaacatcttgtgaaattgaaacaagaaaaaagaaaagttttttgcttctgctgtccttttctcaacactcccaggttcccagggctatgagaattggggtcagtcacacctttcctgtagggatagcacaatgagtgggctgtggtcaggggtgttggtcaaaactgccttggagtaatcccgaggacatattcctccctcctccccgactccagcactgaaacaacactcagctcaaagagtttaggtcagacttcctatgtccagtctgcctccccatatcaactttagttgcttgtcacaaaaacattttgctcacaaaacattccaaaatgcgcaggttagagcagggatttacaaccaaggtagtgtgaaccgccatcctggcatctgtattgagtgcagctaatcagttacaaacgtgcacactcaccaaacacaactctgtacctcaaatgtgggaaggcccctaaatcctatatccagcatatgaataaaataaagggaaaagcaatcatgctgagatgtataataaatcagcatgactttgttttaaaattttgctaaagtttaaacatgcaccggggaaggtgtctattaatagtcattaatatgcatagagatcttcacatatttcactcactaatgcatgccagaatttttcttttcctgctgggatttttcccccaacaaatttttctgttgagattgtgcttcttagaaaaagataaggcaaatgtggttgagcaagttggacactggacacttgactgtgtgtgatgacttcactaataattctagcttgattaaaactggtaatctagaaagtgaatatagtattaagaattaggcttagagttaaacagccaatctaagagaattgcaaatgatttcttattgcctatcaagattcaaataatgctcagaacactcatggctactgggtttttgttgaaaagtgatagctctgggtatgaagaaaaggatgacctcacacacatctttcatccctgtggccttgggaaggaaatcttcagttggaaggtttttaggctacaaataacatgaatgagtagagtcgtagcccttgttttttcctttgtgatttacactgcaatgttctaaggagcgagcaatgaccttcgacatccacatggccttattttacaggggagttgagagccactgaatttatgtccttgtttgagcttccaaaaccaattagcatcagaggcaagccttgatcatgcggctcttggttctcacttctgggctccttccctcaccctgggtgggtcccttctggcagagacatctgctctggagcattcatgcctaaagagtgacatgacatttttcagcacctattacggcctgaaaactggaatccattgtgatgttaagatgctgcactttgtgccaatgagtctttatttcccactttgctttaactcaaaccttgtgtgatacttccaaatgtctgtctcaatccactctgatcttcaacaccagcaagttccaatgggagattttaattcccagtctgctcttgggaaaaggataaaaattaattctcaggttcctcttctcccagtccatgtttgaaactggagatgcaagtggtactcacacaattaaccttctttgtgaccatctctcccaacgccagctttgctgtcaaactctctatacaattcagtgcaagaaacacactattgtggggatcctatataagacagtggataggagtcaggactagcttacagctcccatgggacagacagagcagtgtgtggagactcacatcccaaacttttgctccaagaatgaccacagaaacatgccaggaaagccgagagaatccatagacccttcaaaggaactgggttcactactgtgggctccctgagatgctgaaaagcaagtctgcttgctttctcagaagggaggcttgtggtgtggggcaagttctccacccaggtcaccagctgcttggaaatagactgggtgctgttggagggggatggtgggagtgagaccagcctttaggactgcgggctgtgtgggagtagggtgaggcctgtgattgctggctttcccccacttccctggtgacctgcacgactcagcagaagtagctataatccccctgggaatacaatactccattggattgggaaccgcaccctcatcccccacagcagccatagcaagccccgccaaaggagaggctgagctcagacaaacctatccctaaccccacctggtggtctttctctgcctgccctggtagctgaaaacaaaggtcataatcttttgggagctctgtggccctgcccacagcctgagaaacctgaacacttaaccaggtgtccctcagacaagattgtatcctccctataggactgcagctaatgtactcttgaaagtgccaccccttggctggaagccaagcaacataaaaccagcacactaaacaaaaacataaccaaggaccctgacatagtccacttcattcccctgctacctccaccagagcaggtgctggtatccatggctaaaagacctgaagacagatcacatcacaggactctttgcagacactccccactatcagcccggagccctgaagctctgctgtgtggctagacccaggagagcaaaaacaatcactacagttcagctctcaggaagccccactgctaggagaagggggagaacgccacattcagggagcaccccatgggataaaagaatctgaacagcagccctggagtcccagatcatccctgacatagtctacccaaatgagaaggaatcagaaaaacagttctggtaatatgacaaacaagattctttaacatccccaaaagatcatccagctcacaagcaagcgatccaaaccaagaggaaatctctgaattgccagaaaaagaattcagaaggtagattattaagctaatcaaggaggcacaagagacaggtaaagtccaacttaaagaaataaaaaacatgatatagggtatgaaaggaaaattcttcagtgaaatagatagcatgaataaaaacaatcacaacttctggaaattaaggacacacttaaacaaaatgcaaaatacactagaagtctcagcaacaggacagaacaagaagaagagagaacttcagagctcgaagacaaggcttttgaattaaccccatccatcaaagaccaagaaaaaagaatttaaaaaataaacaaagcttccaagaagtttgagactatgttaaacatctaaaactaagaataattggcattcctgaggaagaaaataaatctaaaagtttgggaaacatatttgagggaataatcaaggtaaacttccctggccttgctagagatctagacatccaaataaaagaatctcaaagaatacctgggaaattcatcacaaaaagatcatcgcctaggcacatagtcatcaggttatctaaagtcaagacaaaggaaagaatcttaagagctatgaggcaaaagcatcaggtaacctataaaggaaaacctatcagattaacagcagatttctcagcagaaactctaaattctagaaagggttggggttctatttttagtctctttgaacaaaacaattatcagccaagggttttgaatccagtgaaactaagcttcatgaatgaaggaaagatacagtcttttccagacaaacaaatgctgagataattcaccactaccaagccagcactataagaactgctaaaaaggagctctaaatcttgaaaagaaaattctcaaatacaccaaaatagaacccccttaaagcagaaatctcacaggacgtgtataacaataacacaatgaaaaaaaggtatccaggcaacaaataccatgatgaatagaatagtacctcacatctcaatactaacattgaatataaatagcctaaatgctccacttaaaagttacagaatggcagaatggataagaactcactgaccaagtttctgctgtcttcaggagactaacctaacacataaggactcacataaacttaaggtaaaggggtggaaaaagatactccatgcaaatggacacccaaagtgagcaggagtagctattcttatatcagacaaaacaaactttaaagcaaaagcagttaaaaaaaagacaaagagggacattatataatgataaaaggactagtccaacaggataatatgattctaaatatatacacacttaatactggagttcccaaatttataaaacaattactactagacctaagaaatgagatcgatggcaatacataatagtgggggactttagtactccattgacagcactagaccagtcatcaagacagaaaatcaacaaagaaacaatggacttaaactacaccctacaacaaatggacttaacagatatttacagaacattctacccaacaactgcagaatatacattctattcatcagcacgtggaactttccccaagatagaccatatgataggccacaaaacaaatctcaggaaatttaagaaaatcgaatttatattaggtactctctcagaatacagtggaataaaagtggaaatcaactccaaaaggaaccctcaaaaccatgcaaatacatgaaaattaaataacctgctcctgaatgatcattgggtcaacaatgacatcaagatgggaactgaaaatttctttgaactgaacaataatagtgacacaatctataaaaacctctgcaatacagcaaaggtggtgctaagagaaaggttcatagcattaaatgcctacatcaaaaagtctgaaagagcacaaatagacaatgtaaagtcgcacctcatggaactggaaaacagaaacaatccaaacccaaacccaggagaagaaaagaaataaccaagatcaaagcaggactaaatgagactgaaacaaaagaaatacaaaagataaataaaacaaaaggcaggttatttgaaatgataaataaaattgatagaccattagcaagattaaccaagggaagaagaaagtccaaataagctcatttacaaacaaaatggaagatattgcaactgataccacagaaatacaacagattatataaggctactatgaacatctttatgagcataaactagataacctagaggacatgctagaggatatggataaattcctggaaatatacaacactcctagattaaaccaggaagagatagaatttctgaacagatcaatgacaagtactgagattgaaatggtaataaaaaaattgccaaaaaagtccaaaaccagatggattcacagctgaattcaatcagacattcaaagaattggtaccaatcccattgacactattccaaaagataaagagggaatcctccctaaatcattctatgaagccagtatcaccctaataccaaaaccaaggaaggacattaaaaaaaaaaaaaagaaaacaatatccctgatgagcatagatgcaaaagttctcaacaaaatactagtgaaatgaatccaacagcatacagaaaagataacccaccacggtcaagtgggttttataccagggatgcagggatggcttaacatatgtaagtcaataaatgtgatacaccacataaatagaattaaaaacaaaaattacataatcatctcaatagatgcagaaaaggcatttgacaaaatcctgcatccctttatgattaaaaccgtcagtaaatcggcataaaatgaacataccttaaggtaataaaagccatctatgacaagcccacagccagcattatactgaatggggaaaagttgagaacattccccttgagaactggaacaagacaaggattcccactttcaccacttctattcaacattcaacatagtactggaagtcctagccagagcaatccgacaagagaaagaaataaagggcatccaaattggtaaaaaggaagtcaaactgttgctgtttgctgatgatatgatcatatatgtagaaaaccctaaagactcatcccgaaagctcccaaaactggtaaataaattcagcaaaatttcaggaaacaaaattgtgttagtccattctcacactgctaataaagacatacctgagactggttaatttataaaggaaagaggattaattatttaacagttcagcatggctggggaggcctcaggaaacttacgatcatggtggaaggggaagcaaaaacatctttttttcacatggtggcaggaagaagtgctgaacaaagggggagagacctttataaaaccatcagatcttgtgagaattcactcactatcatgagaacagcatggggtgacagcccctgtgatccaatcacttcccactaggtccctccccaaatgtgggcattaaaattcagataacaattcaagatgagatttgggtggggacagaaaggccatatcaaaaattaacgtacacaaatcagtagctctgctatacaccaacagtgaccaagctgagaatcaaatcatgaactcaacccccttcacaacagctgcaaaaaaaaaaaaatatacttaggaatttacctaaccaaggacatgaaagacttctacaaggaaaactacaaaacactgctgaaagaaatcagagacaatgcaaaaaaagtggaaacacatcccatgctcatggatgggtagaatcaatattgtgaaaatgaccatactgccaaaagccatctagaaattcaatgcagttcccagcaaaacaccaccatcattcttcgcagaactagaaaaaacaatcctaagaatatagaatcaaaaaagagcctgcatagccaaaacaagacttagcaaaaacaacaaaactggaggcatcacattgcacaacttcaaactatactataaagccataatcaccaaaacagcatgatacagaatagagaacccagaaataaagccaaatacttacagccaactgttctttgacaaagcaaacaaaaacataaattggggaaaggacaccctattcaacaaatggtgctgggataattggcaagtcacatgtagaagaattaaactggatcttcatctcttaccttatacaaatatcaactcaagacggatcaaacacttaaatctaagacctgaaaccataaaaattttagaagataacattggaaaaatccttctagacattggcttaggcaaagactttatgactaagagcacaaaaacaaatgcaacaaaaacaaagataaatagatgggacttttgaaaatctgcacaacaaaagaaatattcagcagaattaatagataacccacagaatgggagaaaatcttcacaatctatacatttgacaaaggactaatatccagaatctacaaagaactcaaacaaatcagcaagaaaaaacaaacaaaaaaacaaaaaacaacccatcaaaaagtgtgctaaggacatgaatagacaactctcaaaagaagatatacaactggtccacaagatatggaaaaatgctcaacatcactaattatcagggaaatgcaaatcaaaaccattatctgataccacctaactcctgcaagaatggccataatcaaaacaatcaaaaaataatagatgttggtggggatgcagtaaaaagggaacacttttacactgtagtgggggtggaaactagtataaccactatggaaaacagtgtggagattccttaaaaaactaaaaatagatctactgtttgatccagcaattccactaccaggtatctacccagaggaaaataagtcattacacaaaaaagatacttgcacatgcatgtttgtagtagcacaatttgcagttgcaaaaatatggaaacagcacaaatgcccatcaatcaacgagtggataaagaaaatatggtatatatatatatacacatacatacacaccatggaatactactcagccataaaaaggaacaaaatattggcattcacagccacctggatggaattggaggctagtattctaagtaaagtaactcagaaatggaaaatcaaatattgtacattctcactcatatgtgggagctaagctattagggcacaaagacataagaatgatgcgttggactttggggactgagagaaaagagtacgaggtggtgaggaataaaggactagacactgggtacagtgtacactactcaggtgatgggtgcatcaaaatctatctcagaaatgacccctaaagaacttattcatgtaaccaaacacacctgtttctcaaaaacctattgaaatataacagtttaaaaaatttaaaaaagaaaaaagaaacacaccattgtggtttttacaagaccccaaagtttgaggaattggttagttagctccacattttgacactcaccatgtgtgtaacacagcataaagcctcccctctgtgagctattagatgagaaagatgaaacaatactggcacatctgaaaaagcataagaatgagcagaatggtgccagtcatgcaacagagagtggtgaaaatagtgtgtgcactcatttttggaaagagtgattggcatctggtgcttgttcatgaaaatgtagaatttcaggacctgggaaagagttcattcaatattttgactggctgtggtttaaatgaacaactgtttctgaacactcctgtgccaatgactgtctccccatctgctgaccatcaccccgtcagtactcatctgtgagcagcatctctgtgagccacgcttcagcgcaaggtttgctgtgctgcaatctgcttctgtttgcatacgaaaagagaaaagtgaataaatgtttcaaaattcctacgttggaaagattctgaatccaccccagtcgtcatctacttctttatttagaattattcatatgtgcgttatttacagtttctccatgtggtgtgctttcctttgtgtttctcttaacatttttaatgaccaaaggcaaacaggaatcagttattttgtcacaattccttcccatttaaatggagatggccagattttcctatggcattcatactatacctattttctttcttactttcttaatttcctctcttaagtcttatctatatctttgttaggaagaaataatttcagatagaataaactaattaatatatagttatagatattttcagaactatctattatagtttcagaacagactattttgaatatatatatatatattcaaatactcagacctgcaatgagcccaaatatgtatttaaatatacatattcaaactaacaaaattttagctgcagctaaatagcaaacttaagaagatgaaagatagatgagccagaattgtgatgggcctgagcttctaagatctcagtaggtgttttacctcctaaaccaacattgggagagcgttaaaattatttatctctgcccttcagttacataagctaccttctattgatctgtctcattaaactgaggaaggcatgtgagactcactgccaaggaattcaattgcctcattgccacttgttgctatttatgtgtgaaaatgacagaaatttatcctgccatccaggattttaaacaaaaacaacttaaatgaaaaagcctcattttctgttggggtttcccttgggaaggaaacattgctctttttaagtgggatgaattttgcacttcattaaacgccttgatcttttcatcactttagcctttaatgcaataacataatcttagatcatctagattaatgattacaataaaattgtgcatataaatcttacaagggccatgaaagtgagcagctgcagatgctgaagtctgatttctgaaactttaggcagatttatctctattgacatatatcctactttttttgtctaattaaaccaagcttaatcttttcacatgtttttctcctagagacttatcaaacttccagtcaaggagttgaacaggtctttgggaagcaatttgttccctggcctaatgtttaactcaaatccttctggtgtctttcaagttccgtcttgatatttgtggaaatcctaaactgcacaagagccctgttacacacagaatggcattctccaagaatccctgcagccaaagattgtgtcccaatttaggacatgatgattaagactatttcactgagagaagcatccctattgttcacctctctgagacctactgagccaggcaggaggaagtctccttggcctacttgcaccagcaggagcgagcgactcagagctgcaatgagcccaaagaacacagggcaacagccttggcatgtaggccaaggatttttaaactagtcttaataactcaggtcaagttcccagctagggtcccttaacaagtcaagcaaagaaagacttggggagtttggagcattttaggttctgctgtgtaaggtagcagttcttggttctaccaggaattccagacatattgtcctagaacattctgtggttccataggtgcaagacacaaaatatactactatgctcttctttgaggctaggttttcagatgtgtatgtgaaagaagtaggaaccatgtctgctttgtaaatactggtgtcttaatagaggttcatgtgataaagcaggggaggcctcagtgtggtagaggctttgtgtctcagtttgggctgctatatgggaataccacagactgggtggcttaaataataagcatttatttcatttcccacagctctggaggctgggaagtccaagaacaaacgtgctagacaattctgtgtctggtgaaggcccacttcctggttcatagatggccgacttcttgctgggtcctcacatggtggaaagagggctggagagctctctaggatcccatttataagggcaccaatcccattcatgaggcctactctttcatgacctaattgtcttaaaaaggccccatcatctaataccatcatcttgggggttagaattttaacatatgaatggggggtagaaatatttaatccatcatatcatacaaactgtacagtccactgagtttaatatcctggaagagcacatacattatccattcacatgttactatcactcaagtaggtgcattgttggtggctctggccaagatcagaagcctaactctaagaagtgagggtatcagtaggtcagagtaccaaaggatgttgtccttcctcccataggaagtagataagctatatataggtcacccacatctgctttggagagtagccttcacagatcctatttgaaatacagtgacttaaagtcagctaatttgccaaacatccatcacagatgaaatatctatccaaagatatgatatacagaaactgggtcgaaggtggtaaagcataaaagaaaacaagaaaataaacccagaactacccagttagactctaaacagaatcctcttctagagagattaagctcttgcaatttcccaattgcttggcttggggttggtgatgggaatagtcctgataatttttgccatgcctgtgtggacccagggggctactggtactcattaaatattttgaaatattcaaaatggctttactaaaatttgtgagacaagaaaagtgaacatcacaaattaaggaaacacgaatgagaaggctggggatactgcaggctcaaccctttccatggaaccagcaaaactcaagctcacctggtattttttccacctctcctgtattttacctactttgtctttacactgcaacattggggagcaatttgctccatatgagttgcctaaacattcagaccaagaaagagagaaagaatcatctttcccaccttcttaggatctgccttctgtctacttccattcattacccagaaattaaaaccagaaatggcctttctgcccaggcaaagttccactttctacccaaaggaatgcaagcttgcctttgcaaggatggattaaaaaatcatacctccataccatgaccaaaaacccatacaatcaatgtgtacccgatagtcaaggctaactcatttatttagcgtcacagagataccttaattctcttgctttttcattgcttttaaattttccctccccaggcactgttttctccttctgaaatccctactatttgtgttatatcttccaagtctcttatgttttctttttttatggttttcattgctttgagatttattcaaactgtaagatatttctttttggttttctgaaacacaaattcacattttttcagtttatttgttttcaatatcaaaagcatgcttcttagttctccaaagttacttttggtgctgtaattgcatatccctgaagagtctcatcccttttcagtttttctcttcttcttcttcaattggaatcaccactggtaggtgtggccttggggcctctcccttggaggaccgagtcccgttcatcttctttgttttccttagcacacctgtagctgtgtattttccagcactcattctggtctggatgttgggagtctcttgaacagggacaagctggaggctgggggagggtaggtcagactctggtttggggtctgagagagacagacctggccacccagacctctctggagcatacactggcagcccctgtcaaccacaggagcattgggtaacttcaacttgcaaaagagctttggcctatgtccaccagggctggccactgggaagccactccatgctccacccaacaaggagacaggtacaatcctttccaagaagaacttaagggctctgctggctgggcctccttggggagccatgaaatcagtggcattggcctcagacgtagaggacaggccagcctctactataccatgggtcccttggttcccactaagaataataataatcatgtaaacatctggtgcatacctagggctgacactaagcagagagaaggtgaggtggaccaccctgtgtagctgcagttcctggaactctcagtgccacagacacccttccagctccacagtaagcctgcttacttgtgttattataagaaggagttgaggggcaaagggattggaggcatatattcagatatgccaaaggttgttttctttcaaggtgatacatgctaataagcacgaggccaaagcaggcttccctgagagcagatgggtgtgtgcatgcgtatgtgtgtgtgtgcacacacgcatgtgtatcagcacactgtggactgacacaattaacctgaccagaattagctcaatgcatcatggcccagggtcagaacagtatctcactcacccaagagatgggttccatcatcattcatctctccatttcccacctatccatccgtcttcccattcagcctattccctacccccatcccacccctccatctacccatttatttttctatagtattcctgaagtcagggcgtttaatatgtgattttgtggaaaaatgtaggagacagggagtttatctccaggatcacgtttcattcatatttaacacatctgtactgctggaacaagatgcaaatcccacaaacccttatattgcaacacctcctctccccccgcttttaaacctgaacaataactttgagcaatataattctaggtcattaagagaaaacattggctgggtgcggtggctcacgcctgtaatcccagcactttgggaggctgaggtgggtggatcacctaaggtcaggagtttgagaccagcctggtcaacacggtgaaaccccatctctactaaaaatacaaaaaattagccaagtgtggtggcgggagcctataatcccagctacttgggaggctgaggccagaaaaattgcttgaagccaggaggcagagtttgcagtgagccgagatcgcaccactgcactccagcctgggtgacagagtgagactctgtctcaaaaaaaaaagagagaaaacattgatgcgtcacataaaataataacattgagataaaaatggcacattacagaaattaatgctttgtgacttttcaaagcactttcacattcattgtcttatttggtttccataggcacctatccatcagcaaagtagggctggcatctttattaatttcataaacttgtttagagcttattttccagatttcataaatagcttcagttctaaaaaaggtgagtagcagggttctggagtatacatatttagtgtaatgatttggtaaaataattacacattgtctgtaatcccagctactcaagattactgaggcaggagaactgcttgaacccgggagcggggtgtagcagtgagccaagatcacgccaccgcactccagcctgggtgacagagtgagactcaatctcacaaaaaaaaaaaaaaaaaaaaaagaattatatacagtatcttaaaaataattttctcatcatccattattattcatgctccctaagcctttttcaaaccccaatgccatcctctttccttccagtacattttaagtctaccttataagtatctgtaaagcagtagaatcaaaatccacatgaacagccttcactctatttaacagggcaactctactactaacagcattttagctggcctcgtgcctaagtgcaaagaataagtaggaaataataggaagtaaaattttaaaaataatgagaaaaattttgagggcttcaaatacaaatagtggaagacaatgaggtatcttcatgttagaatcgtgtctagactcaaatcccaacccaagccattgctaattttgtcaccttgagcaaatcttcttatttctctgatcttcagtttccttgtctaaaaatgaggcataaagagcacacatgaagtgggacacatgtacagtgttaggcccttctgctcttggctgatgataggagtctggtgaccaaccatcttggtttgcccagggctggtgggcttcccaggacacgggacaaagtggttaccctaggtgggaagcgcgacaggataaaagggtcctcatgcatagacagctcccctccaaattccactcgtgtcccaaacctatctctccaggaaacacacagaagccatctccggttggattcctaacactacgtctcttttcattgttcttgtaacctcatgctggtgatgtgtttatgctgctctaaagttgtgtgctattttctttaaacagcatattagggtgtgagctccctaaggtcagaggtcatccttctgtatttggtaggacctagtctaaccccctcccgatgctcaacttgcaccatcagtcctggctcggcaaagtcacacatctcaaagagatacagttctgattgcaagagcatcagggagtcaagtaagttcttactgaagcctcttgaagaggcaaaacggggaggattacatccttggaaagacagagttaagggctgtaagacttctccttagaaaagattcttctcaaagtcccctgttctctttttcagtctctccttcatcactcctgattcttttctcttgggaatgactcagggtcctttctaagacaggcaactcatcctcctttggatttttccaatttcctttttccaatcctttccaatcaggattgcagaatactccacaaaggctcaggagtccagcaggtcaaacgtgtgtgtgtgtgtgtttgtgtgtgtgtgtgtgtgtgtgtgtgtgtgtgtagctgaagggcaggggtctgtaaacagtttgctgcatcataataacacatgtttcataaataattggtgcttaacaaatatgtactgtcttgggttatctctctgtcacccgggtgggtggctttaggaagaaattagttgtgggtcaaatgcattttacaatgatggaccccagccaggaaaagaacaatcttcctccccctacgagggcttagagtgagccagggagtggaagaaggtattgcaccctcagtagcagaagtgagagtccctaaagggagatattcaagaatgagtgtgtgtgttgggatgtgtgtgggtgtgtatttgtgtgtaggggtggtgaggaggcattagtctgctgatctgggtcaatatagtgaaaatgaagaacatgggattgggcattgaaggcttgtatgaatgcactagtcctaggaccttgaacaaactccttgtctccatgccacagttttctcatctttctttatagagtttttgggaggactaaatatcctaacacacataaaacacttagcacagaacctggcatatagtaaacactcaataaacctcagtgattactgttattagggctgaccccaaccacagctgagaggagtccaggcctcagtaaactctcctgagaggggaccacaaggagctgagggtgagctggcttgcgtttttggaactgtcttaatatatttgaaatttatgctgaaatccagtgtgccaaggtctctcgataaaacaggggggaaaaaagtggaagcatatggtggtctgagtcttgaagaagaatgacttcaattatagaaacaggctgttggagaaatatgccttttcagccccgtcagtcacgaaccttttccaaatgttgacattacgcatgatattaatatactataaaaaatccatgtaaaactggaaaagcccaaacataccatgcaaagcctgagtcctgctaatgccccatcaggattagaagcaaaaattcagttagttctgcctgctagggtttgcagtggcttatgtcaggaagtctatgacaatttgtcatcatgtagaaatatggctgcatctggatttttctaaactaagggaagcatttgtacatcaaaagtcctattaaggttttactttactttactatcaagaactttttgccttttggttctcttataggtttggtgggtaaatccccatttagaataaaggcctatttcttatcctctgagctggataagctattcaggcagagaacaacctttgaagttaagggaaactgtgctatcaagccaaacgtgaaataaaatcagaaggggacccctaatgcattatggaatacaacgcagaatttggccgaaggtgatgctaattttctgctcttgtcaatgaaaaacagacgccaggacgacttgcttgcattcatctgaatccacatggcagcgtcagaaagctggtgagcctggtgggccggggggagctgtggtctggggcaagggctggttcctttgttttcattggcatggcttatggaaaagtcagagaaaatgaatttcaaatgatgggtcaaaactcaagatttgaaacacatttcttccatcctgtaggtctcatggatccatggaaataattttgataactttaactccatttccagttgcaggtatgttgtccatagagttccattaaacaatatttttatttcagtcatttaccattcaatgagtcttttaaatcctgtaaagtcgtggaaaaaagttcaaattggctataaatgattacactaattttctgttttctttccatttcttttctggttttccttttaaaattgcccctcttgcctgcagcatattttgcatcaaaaaatgtatggaggatggaagacccttttcacgcagcagctgggacagagtattgctcaggcaacttgttccctcacactaatttttgtctgcattgtaaaaatattttaaatggttttgcatgctgcatgaaaatgtggaaataacttatactgtttggtggtaaaatgtaagaaattagacagatgcatgaatgctcttatgggcagaagagaagcagctgctttccaaaaacactctgaactttcagaaaagggaacagtcactgattctagaatcaggaggaagaatacataaatgttatctgctgctccttttggttaatttggttatggaaggcagcttctgaaaagggtcacacgcaccgtattttggcataaaaaacagaatcacaaggaagagaagtacctcccccacccccacttgggctgtgggaggaccctcatccatcagcgtctctggtacagggatagctgctggctcagtggctctggccttcatcctggggtcctgctgctgccagggtgctgtcttctcaccttttcaaagaccctcatctctactgtcccatatccatccctgctgaccaaagcaaaactaggtttttcttgcttttcctgggctgagcctcttattgttcctagacacagccagcctggtgagcacaggcaaactggacattggaagacccagctgcacaaagactccttcctgtgagaggcttggagaagactttgctctagacacacaagggagcctgtgggaaggtgagagagatatcccttctcattccaagcctctaccgggaggaaaggttgctcccagagttggggttgtggagctgtttatcagggttgggtcagatggaaaaacagaggactgtatgtaacctaaggtgaagtaaagaatctaaatatgctcagagaaaggcctggccttttgctctcagcttctgggaagtgatctgtgcctttggaatgtcatgtctgataggagtggctttgtttgcctgcaggccttggaccagccagatagtgacaaggtgattttgggtggggccttgggtcacatcaacaagccttagtgaagatgggggctttaggtcatgtggtctcagcttggtctgaggggctgggaactgagcccagttacctgggcagccagccatgcctaggtggtgataagaccccagcggagcccctggatgcaaaggctcgggtgggtttccctgcgtggtgtgttgttgcacagcatgctggaaaagtgatgctgttgttattcacagggagaggacgatggaagccctgcctttggtactctctgggttccgctctatgtgcttctttccttagctgatgttagctgcattcttcccggtaataaactgcaatcaccagtgaatagctttagtgagtcctgtgctccttctagtgacttattgacactgagtgtgtttttgagagccccctgaacttgaaattgatgtcagaagtgaaggtggttttgtagacactgtggctctaactttgcagttggatagaggtggcaggagttcacctgtatttttttttcccctaaagtagggtctaattcacccccatcaagaggtgtattctagaatttgcacacggacccctttctttctcatttctgtgctttttaacagaaccactaactcttataccctctcggccatacattatccactcacattattttcatttgaatcacatactcacgttagtaattccttcttacttgtagctgatgaagtttgtttgtttatttatttatttatttatttatttattttaggttctattaacattgacataccaggcccccaatacatgtgagttctcatctctattagttttctggagctgccataacaaagtaccacaaattgggtgacttaaaataacagaaatttattgtctcacagttctggaggctagaagtcagaaatcaaggtgtcggagggccatgctccctctgaaaactgtaaaagaggcttcttcctcatctctctcatagcttctggtggttgccagtagcagtactgggcactccttgacttgtagatgtattattcgaattctctgtctgcacatggccctctccctgtctgcacaaggcattttgtttttttaaataaggacaactatcacattggattagagacccaccttactccaatgtgacttcatcttaactcattacacctgcaatggccctatttccaaataaggatactttccatgaaactgggggttaggacttctatacacatacacagatgtgtgtgtgtgtgtgtgtgtgtgtgtgtgtgtataggaggacataattgagcccataaccccatccatttcccctcatgaaagataaagctaagtatgtgagctcctgcgcctcagttccttcctctgtgaaatgggaaagattatatcaccacttcccatcctgggaaaggatgagaagagatacagcctctacatgcacagcactgggcacacagtgcagaaataagagctcattgtctctgggaggactgtttctaagtagggtgttttctaatgcatttaagttcattaaaagccaaggtgtgcaacgacactcccctcacctgtgctttctcgtccttctgccaccaggtgccaggggagccaagaagagcaaaaccaaggaggcattgtttcctccagagcctcattcatcaactcgctctgaacagttagcacgctcagacagtcatcttctgcaccttgcctttccctgtgtcttgactgagggcttatctgagagccttttgttcaggctcataattattcagtgactcaggagcccacaagcattacccacggagccagacaagaccagcaagctctgaggaccacctgttccaagtcatttcctgtgtgggcggcaacttcacagggctgaaaatacgagttacggtaaaaatgtcttcaaccctggcgcgctggattgttgaaactcgatggaatcttgcttgattatgttcaggccagacacatttcattatcattctttgcatatatattaaaaactctaacccctttacaaacaaatgttctcaaggggcagacagcacacccttgcctcatgacattgctctaatagagaaaacaccccagtgtttcacccattaggtcagatccacgaacacagagtgcagttgggaaggatgtgggcagtaatgaaggtggtgctttttgctcctgtgggtgctatggacaggtgagggttcaaggatattaacaacaaattttaagccataccttacactacattggagcttaatcaaattctctgttcacagtatgcctaaattggccaatggaacggaaaaaaaaaaaaaaagcaacccacccccaagagttatttatgtcatgtagacaaaacctgggttcgttgactgattatttccactctctagtgatggtcgttgcattttcactctgagttgaattgctgcatttttccataaatatatctgctcctctggaagaagctttgttgcttagccttattgcccttcacgtctgcctttctgacctcatagactgtcaagttcttagttggtgactaaagtataaaagtaatttctttctctcttttttaaaattattaaagccacacatgctcactacagaaaagttagaatgtagatatgtgtgaagaaaagaaaaattagccattaggcccacaatctagggaaaactcattttgggcatttggatggctttaatatgcattcactattaaatgatgaatatgatattatacatagtatactaatatattatgatgatggatcagtgctgatgtgttttaacataaatgtatatgttagtaatgctgctgttttatcttaacagtttttcaaacttgcattgttttgcccttcagctaaaagggtagggaatttgctagggatataaattcattaatcataaaaattatgtcataacagcctgcacagaaatcacaataggatgcaggacatagattagactagagttgagattcttgccccaaccacaactgttcaggctttgaaaagaaaacaaatctttttttttttttttttttttgaaatggagtctcactctgtcacccaggctggagtgcagtggtgcgatctcggctcactgcaaactccgcctaccaggttcacgccattctcctgcctcagcctcccaagtagctgggactacagcgcccaccaccacacccaactaatttttttgtattttttagtagagatggggtttcaccatattagccaggatggttttgatctcctgacctcatgatctgcctgccttggcctcccaaagtgctgggattccaggcgtgagccaccgcgccaggcagaaaacaaatcatttttaagcactgattctaagtcagcattgcccggttaagctcttacattttcaccagaaatcaacccccgagacttagcaagtttgagtgacctgttcccagtggtgctgttctgacgtgtctgatgtcagatcagaagctcaggccttccaacccaacgcataaactttcttttggtataagtatgttctttgtattgcttatactaaaataattatttgttgttcatctgaaattcaaagtgcatggaggtcctgtatgttatctggaatctcagtggaatgaactaggggttttataatcagcatttgtccctactgctgaggctgtggcatgtgagctgttaagtattttgaccgtatccttctgcaaacactggaccattttgtctttcatgcagccgacttatttatgatcaaggagaacggtatagggaaatagacccaagttcatattacaggaagattgtgtgacgttacagaaagaaacataaccacctggttaaaaccttagctgtgtgatcttgtactagttactcaacctcgctgaggctgggattatgcaaaatggggccaagcacacctgcttctcagagttttggccataatgaatgaggtaatgcatactatcccataacgggctctcagctgcaaagggaactgtcttatctacacttataatttagtcaagtcaactaaaatgctgactgctccagtcccatacctacctcccatacaccccagtgactgaagtcaaagccagcatcacacacaccaatttttttttttttttttgacggaatctcactctgttgcccaggctggagtgcactggcgcgatcttggctcaccgcaacctccgcctcctgggttccagcaattctcctgcctcagccttctgagtagctaggattacaggtgcctgctgccacacccatctaatttttgtatttttagtagagacggggtttcaccatgttggccaggctggtcttgaactcctgacctcaagtgatctgccagcctcggcctcccaaagtgctgggattacaggcgtcagccaccgctcctggccacaggaggctcatccctgatggcctcactcagggatgagccttggactttgactggccccaataattcacagagtcatgccttcatttattaaaaaatccctggggaatatactgtcttaggatctggggacatgaaatgtattgtgcctggcctcatgctgcttatggtctagcagggtagatgggcattaagcaaatgcttgtgaagataaggattttagcacaagctgaaattagtgttatgaaggcaaagtacagagtggtatgggaaagtaatgcaggaggaggtgaggtagaactgtgctttgtcatccacacgagccccgattcctcctgttcccaaccaggcgaacatgctgttcatgcaacgccaaccaaaattaatggggaaagggagtctggggatataaaaagtgagataaaggggctacttattttttttttactgttgtttctgcttgtttatataaaaagatcctttcaacatttacagagctttaaagtatgatgtgaaaaataagtactttgtacttattatggtgcctttcatctgagttgctcataagccctgcagacattgcctcatccattttcagaagactcctcaaaggaaggtaagaagagactcttgcccccacttcacagatgcaaagactgaggcatgaggaggtaacaggggctaggagagtagtgttggatcaggggctgaggtgcctggatcctaggtctggctttgccattcaataactgtgtgactttgggtgtgtccctctgggttcttattaggaatttggaatagatgattcccaatgtctcatacagtttgaaggatctgtgatggtgtcagggaaaatgggtaagtgtcacagtgctaattcctgggacataattcaagtcttcactcatgacttcagcttcagaataacatttctgcaagaaggccatccagaaagatggagacaataactgactcctggagttggaaggacccttggatggctccgtgtggcttaaaatgcctaaataccagaattgttgaatgcttgctcatgacacaggttcttggaacccaacccagtctgtctatccaaatttataggccagaggcctgaggaacaattaatgaaatcatcaagtctggaaagcacatagtccaaatcagtggtctcaagctgggctgcacactggaatcaccagggagctttgaaaaatggagatgccaggatcccactttggatattttgatttagatggtcgcaggtatgtcctgggtatctggagattttaaaatcgtcctggggattctaagggcagccaaggctgaaaaccacagacctagatcaagctctcttgtgatgctgatgaaatgaatgggcttgatgaagctaatctcacccatgagaaaccatgggcagagccactgctgacttggggggcaaggcagagctggatgccccccttctgactctacctcccactctgtccactacattatgtggactcccataatgcctgagtgtaagagttttctttttaatatgcagaaaaaatttaaattatattgggtaaaaaaaaaatattaaaaaaatttaaattgggaattaaatgaagcatttagaaatcaaaattttctgtgtggcccccatcaccactaccgatagcacaaaggtagttgaaagaaacataaacttggaaaaatacttgcaacataaattataaagggttatatgagaacctttagaaaccaataagaagatgactaattcaatacaagactgatcaaaactaatgaatagaaaatagacacacaaaaaattttaaagggccaatgaaaacataaaattagttttttattcttctttaattattattcttaataattaaagaaatgtaaattaaaatattagtgacacattgatactcattcatcaaattatgaattattgaaagattgataaaatccatttgggtagtgaaagcaactactggtgagaagcaagctggcataagatttctggagagccattcggcaatatataccaaagccttaaaatatgtgtatattttttatttttatttttactttttttgagatggagtctcactctgtcacccaggctggagtgcaatggcgcgatctcagctcactgcaacctccacctcccaggttcgagtgattctcctgcctcagcctctggagtagctgggattacaggcctgcaccaccacacccggctattttgtatttttagttgaggcagagttttgccatgttggctaggctggtctcgaactcctgaagtcaggtgatccactcaccttggcctcccaaagtgctgggattacaggcgtgagccaccacattcggcccaaaatatgtgtatactgtttaacttggtaattgtatctcaaacaaattgtcttaagagaaaagtgtgttcagatgtatacgtaagaaaattattcatcataggattatctatcatatcaaacctttggaaataatccaatcctccatccgtaaatgtttagtgaaataaatttttattgatccacatggtggaataacatgcaactattaaaaattgtattgcagatttacacttgttgacatggaaatatgttccatatatagaagtgattagagaaagttaccaaactatatatcacagaagttcatttttcatgtatgagtggctaggtttacattgacaacaaaaacctaggcttggggtcctctactggttttgcctatggtgaccaactaattatctgggttttcccaggactggggggttttctgggatgtgggacttaatatccctgagacaatcctgagacaatcctgagaaaactgggatggttgattgccctgatcttgccactgagtcactagcagtgtgactttggacaaggcttttcatctgtttgtgaaatacagcactttcctaaaataatgaatttgaaatggctgtggctggaaaattggcccccactcttatattaacaatgtttccattgggtgttgggatttggggcattataaaatttatttttaaatatttttttagaaggtgtactcataattttcataatataaaaaacaataaagtcatctctattaaaaatactcctatgggtcaattgagttctattttcagtactaagattatggtaaggactataaaaagtgtttccataggatgtcaaccacaaatatttactacagcatacgagtggaaacctagagattcttgcaagaacaaaaggcaccagggacaattttcccctcaaactgccacaatatcttatgtgaaaaatgacaaataaatgaacagaaatttactctcctgttttgcagaaattacaacaatcctcatatatagattcaatgcagattagatttaaatctaaaatggtttatttgtacccaaagttaagaaggatgcaacaaattatgaacacattttccaagtgagtaaattttgtttgaaaacgccaaccttgaaagtttctctattgatcacttttgcattgctctttaggttaaatagtgatagctgcctttcagagagccttatgatgacggaattagtttacaaagggaagagtctgacagacaaaggttttactcagtctagagggctctctggaggaaggtttctggcaaaggcttagatttgtgttgagcctaaaatttgcatggtttgattatagatgacaataggcaaaaatttgccatatgttctatgatatcaaccatggccccaaaagtgactaggaataaaacatactcttcttagaaatgtcagaattgcacattttgggaggcttgcaatgcaaggctaattctgatgcccctaacgcattcaaagtcctgacttcttgtagaacaggtgtcactgccaatttttcacttgtcctgtagcagctacagaaattggaggtgtcttcaaaaggcaagacaatctacaggctttgccctgcagggtcctggccaccatccctccagcagaatccaggccagccccctgaacaattcacctcaacgccggatacattttttactgctacaacttttgaaatttcctccctaacttctttctttgtgctctgttctccaagtcaggaaaaggcagacagtgctgaaatggtcaacagttctgcctttgaaaggcactttgcttccttctgtgtctggaaattacacctggatctcaaagcatcatgtgttgtttttgataagaaagtctgatgagagtgagtccatggtttgattcacatgctacaattgctgacaagtttccacatgaatatttcaatttagtgatactactaagcagtatatttttcttatttaatttcatgtccccaaataaatcttaggaaagtagaaaatgtttgcaaaattttcctccacacatttagagtccctccatgctggcagggtgcccagactgctgcagagttagagcccaggctgggctgctggaaacgcaactatgggacggctaaggtgcaagtctagacctttcctgtctaaaaggcactttccgcccagaaagatgaaaatacaaattgcaattccagatacagacaattaaaagcactgtgtgtagtttctctggatgctctaaaaaattatgtgtgaatgcaaatgtctctcccttaaacattgctatacaatgataatggtttgggaatagagtgcctatgtatatattgaaagctttgaacttactttactataccaaactagtttgtcaaaatataactgtgtcaaaaagttataaagatgaaccaacctttcactccccttcaaactaaaatattaaaattgatcaaaccctgacctcagttaagggcttggttctgccactagctggataacaggagacaaaggatgtcagggtcactcttctaacagtttgtgtgtttatgtgcattttaaaaaattatgttcttgtttttctttctcgccagcacccccctttttttttgtaaagcaactgattaagtaaagaaaaatcatctatctggttagggaaaactggtagaatctgaatgtcactcacttctcagatggcaaggatttgtacaaaaccttcatataacaattgtaaattgtcactgctgtgtaagaccgtcaaaaagtgagtgagggctcagagacacagagggacttctagctcggctgtatcgctttcttgttctgggaccatgggcattataagattttgaaaacggtttcttcatgggaataatacttgtatttatctgagataattgttgacaaatataaactagtaaagtcacaaaaaatgcttatgaaggaatccggaatatactaacttcccacttttattcatggtcagtgtcatcgtcatcattctcttcctcccaggctagttaacagaagggtaaaaacattttgacctacaaacataaaatagtcatatcatcctccaaagtaacacagttaatacactatttcagaagcaccattttagacactttttgcccagagaaaatcttaaagaaccctattgatttgttgtttcacattttccagtattcagagaaaatctgtttagactcccttgaggactactgtccactcagtagaacccatccttaatatctttctccctttcccatcataatggtgactatggagtgatcttcagaaaccttagcacaaatgcaaccccagagatgtcttcagaacaaactaaaacccactgtaacatacctggaggaaaaaatgccactggaatcaactttctgttaataaagtaagtttttccccaaatattcaaagtgtgtaatacctgtaaacactttctccaaagccactttcaacccacaaataatatttttatgattaatcatagagagagagggcaaatatatgcagaactatgtcacactccctcaaccgaactttctggtcatttcccccgttagggttgggagaggaggggtggtgcaggggatggagagagaaggtcctttgtctggaacttttcattactgaggggttttaccaaagaagcaattcttttcacacgctatgtctcaccttgagttcttatccgctggggacatagttgatcaatgatgtaattctacaattatttaaggatagtgattcttttattctcacaaagggtttgctgaaaattaaaagaagcctgcagtcatttattttaatctcccaagattgtttattgttcctacaagtcaggacagcctcatctttggaaaacacattccaggagaaaagctgataaaatgatcgcattgttagatgggtggggttttgcaaggtagaatccgttgatggtcttttaaagcagcactttatattttatcttatggtatttctgaagtgcatggatggtcatttggtgcaaatgataactgttcatttacctttagagactttgtaatcattgagaagacaataaatgtatataaattataaacttcaataataagttcttgaaaatgttcatttcctgtgccatttccttcctatgcattgccatacagctctttgtatgtataaatgaggaagaagatatgcacttaagatgatttctttgaatattataagcctccccgcttccaatacaattaatcaccttcccatgtgtgatggaaactgcaaaatactttttttccttgtgttataaaaatatcccttgattgtcaacttttagtttttaagtgctttgatctactttgaatgtgaagagtgcagggtccccaaactaagtgggtggcctccaccctatggtgtgagaaaaagctgtgaattttcccccttattttttatgtccatgggtttcttatttagaggaaaatttaatacacaattggtacctttgcagttagctcacccaaatgttatttgtttaagaggtatttgatgtccaacataccgagtgattttttttttttacaagacttatttaagctcttttcctaggaaaaagatgttgcctttctgccaagggcatattatcttcaaaaactggcatttttagccttttttccgcaacttgaattttccacatcttaaattgtctcaggtctgtgaactgtagattgggagaattagaaaagatcttccttcctagtagctgacattccttgcttaggaaactttacacagtctccctcatttgatggaaaaagcaatcattaagcattaatgggagaacagcaaaatcttcaaaatctgactcattttagataaacactttctagctttcaaatctattctaagccactataatgctcaccatgtttaaaatggaaagaaatactttccgaggtaaatacccaatgaaccgaaataaatagaaatccagttatgatgaaaaatattaaaggaaaaagactaaatgaactttcaaaccctctaaagagagagtagttcacctgttataacacgtgtaaggaggtgaataaattgtgtcaactaatttcccaaatacaagatcaactctcatatctataggggagataactaattgaaccatgaccccagcaataaaattcagcacatctctgaagatgaatattaacgtggtttgggagagaatgtgcttgagatattaatgtttttaagaaccaagttgtggtttcttaggctaaaattgcatggctacatttgctgtgccaagaatagagtttcatactctccgaaaacagcatgactccagtgagatgtttggtcggggatcccaatcgtgtaagatactgtgcaattatgtctacttccttcctgtccctaaattctaccaattccaagtgcctttggaacagtgtgatcagcacttagataaaggtagtaagggcccaccagtccttggatgttctcctgggcttcatgaaagaaaagtctgcagcaggtaaagactggggtcaatggctccctcagtccaaactggacagccttgggaggaggccactcatgaaaatttggctacagagatatgttagccgtctttgtaaccagtactttaaaaataaaatacaataaaataaaaagattcttcaagagtactcatgcaggcctcagtgttaatgtctgctcttggacttgaaaacattcttgccccctccataaacattctttcccactgctgaaagctgttgaatgcttgtcaggcttattcaaaatttgatgaccttaatggaaacccccaaagatgacaacagataaagaataaaaccaggacatatcacttgtaaacacagtcaatgcatccatttcttgtttttcaattaatcatctcttgagctaagagcttagaaattccattcagatttagacattcttttaagagtatgcgtctgatttccaaattaccagcccgatagttctgactaatggaaaataatgcactactttgcttcaggcaaagtcaagtatttgattttcatagaaccaactttcgattaactattctgtggctgtgtttatctaccatgacctttagctgatctgttccaaactggtcaggaagaaagaagtggtcttagaggaagcaaagtctgttggaagtaactctgaactggagtgtcaagaaatctttcatttcttctgttcatgatttttgataatttatcttccctgtgtcttattttctcattctgtaaaaagaaggaaatttaaaaaatggcatcttacagggatcaaagatgctaggaaagatgaaaaaggagtaaaaatgtcattcctgatggacctcaagggcattatgcttagtgaaaaaaaagtaaatggcaaaagattttgtgctgtttgattccatttatataacattcttaaaagaacaaaattatagagatggagaacaagttggtggttgccagggttgatgatgctgcggtatgaatgtaagaaggtgacctgagggggtcacagagtgacctctgtagtaacagagcagttctgcctcttagttgcactggtagttacccaaatcaatacactagataaagttgcatagaatttcacgcacacacacatgcacacatacaaacatacaagtattaaccacatgtaaaaaatggtgaaaattaaacaagatctgcagtacagttaagagccaaacaattgatgttctaacaacatcagtttcttggtcttgatattgtactgtggttatacaaaatgttatcattaggggaagctgggtgaagggtacactggactctgtgtattatttttgtaactttctgggaatctatagttatttcaaaataaaactttaaaaatgttattatgtacctgaccttaggattcttcttaaccaatctcatgttccctgtgtgtatgattacaataaaaataaaagtagaagtatttttttcgaaaaagagaaagtggtgagagagtggcaaatgttacatggagtgggatgagtcacaggaaaaccatgaaacacagttctcttcttgtaacttaactttgcataaaagtgaatacaatgattccttgtttaacaccactctgaacttaaaagcaaaattcttaggaagagccttttgaaatctaagacttttgtaagttgagatgccatggaacatttgttccatgggctgcctcacaaaaacaaagaatttgtagtaaactaagtttgaaaatgttaaacataatttttttccctggctctcttttcaaaatgatattttaaaaaaacacatacctttgaaaaacagactccagacttctacttcctgaaatagtagatgggatgatgcagatgatttggaccaactctatgctaagacaacttgaaatcgaggcaaaacatacacacacgtatcactgtcatcttcattatcatcatcatctaattgaaggcattggaaagctcttaatgcagtaaaggccaagatccaagagaaagcagaaacagagagatgaaatttaccctaaggcagaggccagtactggaagagggaggagagttctcgagagagaacttgcaaaggtaatcagggcctttgccagcttcgcgtagtgagtgggagaaaaatggaagtccagggcccacccagaagaagcttctggataaccttccatgctttagattaagacaggcaagtactatatcctgggagcaagggtggatgaaaagtgaagtagccttacaagaactgaagtctgttttatgattatctcagtccttgaaattgatcctagaatgctgatacttctggccacctgctataaagaaaaataaaccttccttctttatctaggttaaagataaagtcttcaatcatgtttatacttttttatatacatgagacagtcaatcaaacatattaaggcacagagaagaataagaaaagaaaaatagaaacagacccaaaggggctccagataatagttaccaagcacaggatttaaaataacaatgcttaaacggttaaggagattacaagaaaagataagaaattttgatgaataattgggacctgtaaggataactaaagggaaatgttagagctgaaaagtgcaatagctaaaattagaaacagtggaaggactgaagcatatcaaagagtaagagagagtcagtgaattgaaagatagatttaaaaaaattcagaaggaggcatagagataaaaaaaagtatgaaaaatatagaagaaagggtaagagacagaagttctaacatagatgtcatgaggttccttttaacagaataacagaatgagaatgatgtagatacgttatatgtagaggccttgactgaccattttccaaactggcagaaaatatcaagctagaggttcaagaagcaagataaattcagagaaaactacatcagagaaaatggctgaaaaccaaggacaatgagaaaatcttaaaagagactagaggaaaaaagaaacactaattttggagaaggaacattaattcacagttgctgccttgaaaattaaaaaataataaaatgataaaataaaataaaaataatgaaaaccagaagataataaaagaaattctgaaagttatcctccaacctggaattctatatagggtgaaaatattcttcaagaatgaagacatgaaaacaaaataaagacaatttcagaccaagaaccccaccaaaacaaacaaaaaacccagggaatttgtcactagtaaacctgaactaaagaggatattaaagatatttttcaggaagaaggaaaatgattccaggaaggagcaaaaagcaagaaaaggcaaatatgtctgtaaattgaaatgcatcttgactataccaatctataataataacacttgaatagaatatgaaatattccaggcatggtggtgcacacttgtaatcccagcactttgggaggttgaggcgggtggatcacttgaggtcaggagtttgagaccagcctggccaacatggcaaaaccccatctctactaaaaatataaaaattagcagggcattgtggcgtgcacctgtagtcccagctacttggaaggctgaggcaggagaatcgcttgaacctgggaggcagagattgtagtgaactgagattgtaccactgcactccagcccgggtgacagagcaagaatctgtctcaaaaaaaaaaaaaaaaaaaagaaatacgtatgcaattaaaataaatgacaacaacagcaataagttagaagggagtgaaaagaagtctttgcattaactgagatgaggcaaagagtactgatttatatcatatttgagtaagtcaggaaagccagctgcaatctctaggtaagctgtaaaaaaatactgaaagagtgttaaccatcacactcatattctacttcataatcaaaatagaataaattttaaatattccataaaagcaaaagaacacaaggatgaagaaaaaagaaatatagaaacaggtagaagtaaaaagcaaataatagaataataaattatgccctaaatatatcagtattaatagtagcatagtgattgtaaactgtgttcttagggactgacaataatactagccattaatttgttgaagtaatactgtctgctaactacttaacatgaagtaactcatttaatcctcagagtattcatacccagcaaagactgttattatcctcactttaaacatgaggaaacataggcacagagaggttaaataactgtcccaggattacccagcaggtctggagcacagctggagtttgaaaccatgtgtttaactttgagtgtgatattctaaccaccatgttgtactcgatgaccctgcctctcctgtggtagcacaaagaaagatctagacttgtctgccatgaaagaaaatagattgtttccgacttcaggcatttccttcagattagataattaagccaccaacatatttaaacttaaaaaaaaaacatatcgagagaagcttggttgccacgtatattaaaagccttaagaaatttcattcttggacggagcatttgcacatttctgaaggcatcccaagaacaaaataagtatagaaaaataaatagataaacagagatgctcattgcaggcttatctgtgacagtgaaaagatcaaacggtgtgaatgtatcattaatgatggcacatttagtgaaataatatgtggctagtaaaagggtattataagtaaaagcaatatatatatatatacacacacacacatatataaaataaaaagttatattaagtggaggggaaagtaaacaagagagcatatgccagaattatcacaaactggtacaattcccaattcctatgtattcttgacaaaaatcctcagaggagaaaaagaactatgcaaaatattatacattcttgaaggaaatacactgaaatattagaactgtagcatgtatatttgggttgcaggatcagaaatgcatttgcacctctttttgtatttcccagttctccttggggctcgcattaggattaacatgtaagttaattcatataaaagttgtttgggcgcagtggctcacgcctgtaatcccaacactttgggaggccaaggtgggcggatcacaaggtcaggagattgagaccatcctggctaacacggtgaaaccccgtctctactataaaaaaaaaaaaattggcctggcgtggtagctggcacctgtagtcccagctactcgggaggctgaggcaggagaatggcttgaacccgggaggcagagcttgcagtgagccgagatggcgccactgtactccagcctgggtgacagagcaagactctgtctcagaaaaaaaacaaaacaaaacgttgttgtttgaaatgatgacactttctgttatctgatgagggggatgtgctttcactgagtgtatttagaaaaggactcattaaccaaagagggcagagctcctgctgcgatgtaacctcttcccccaccaagtggctgaggctcactcatcttacccttttgcctctagtgtggaaggaactgaaggtaaggccacatggttccaggctgatggagctcggcagtgttcagaagcagctgctttaaggaaagacctgctctggggcctcatggatggcatgagtagagaggaaagagaacattcgagaaaaaagacatcatcaacatatcctatgtgaggccgatgctttctttgcaacttcaagtgatgtttttgtgggatcattagtctatccatctgtagccatgcatccagcaaattcagtatctgtcacatggaaacactatgctaggggcccagaggggagaaaatgagtttaaggaacagataaagattttgtcccagataccaatcaatcatgaaaaaggggacttcactccctttgtttacgaaggtccatttcagtttccctgtctactgcacacattatatcactgagatgtttggctttcctgagaatcgaagaacccgctggaaaatagtgatgtcattctgaaggtagtttctcaaagtgtagtctatgcaggaaggagcggagggacagtagctcttctttatctcaagggtccttttgttggacactttgaggggtccttggttagggttgttgtgaacttggctgggacaaaatacatctttatttttacaaactccatctttatttttacaaactcctaactcaaacatagcattttcttctatcataaatatagaaaagaaattgcagtagtattagaaatatgtgtaactttcagccaggcacggtggctcacgtctgtaatcctatcattctgggaggcggaagtgggcagatcacctgagcttaggagtttgggaccagactgggcaacacggcaaaaatgtgtctctacaaaaaaatacaaatattagcaaggtgtgcatctgtagtcctagctacttgggaagctgaggcaggagaattgcttgagtccgggaggcagaagttgcagtgagccaagatcgcaccactgcactccagcctgggtgacacagtgagatcttgtctcaaaaaaaaaaaagcgggggggggtaactttctcaccagttgattgaaataatggatagcttcaaatcacattatagtgcttacaaatgtaccaaaatattgtgtatgctcatcactaccctgaaattacagtccttgggcttggaaataggtcatgttatttaatgagtttaatgagttaataaagagtcataactgttattattcacaattttttagagaagcattttgataactatattaaccaaaattctccagagaaacagaatggttggcaaactggagacttaaaagagctgacggtgaaatgactttccagcccaaaggtaatcaggcaggaaggatttcctcttacttgggggagggtcagccttttgttctcttcaggcctcaactgattggatgaggccccactcacatcagggagggcaatctactttactcagtccatcagtttaaatattaaacctatccaaaaacgcctttacagaaacacccagaataatgtttgactaaatacctgggcattctgggatccagtgaagttgacataaaattaaccattacaagtccacctgttgttaacttggaacacatactcatctccttaagatgtatttaattaatcaccacatgaagacagtagcaagtttataattctgcctgacatgatacagctttcctgctcacaataaaaaatgtgctaaccctttcccaagaggaggagataaagcccttgagtaatgtttactcttctccttgatagtctgtactcaaaaacagtaatataaaaccaatacattatatatttcatgataaaggaataatagaaggaagaaaacacagaaatttgccctatatctgtgtgcacatacatacacacaagtaaattcagaacaaaataaggaggaaatattcatgacaattacagtcttcatttccataacaggtcatgtaaccgtaactgctatttacaactcccttttcccactattcattatgtattctctttgccttcagcaatcagatcagctagtcatggttctttacttggtggaataatccaagccttcattccagaagggtctgggccactactagccctgcctgaagtgggtggttgtagtttctcattgaccttaatgacaaggcgtggtaatactaaagacactctaagggatctcctatgttccaaacatactcttccttccctccaagtggtcccatttccccttactcgtcaggatcaatcacccctaccagcagagtaactctcttctatgcctgttcatttagcattatgaggagtacaaagtgggagaatggcaatcttaagttccagttcaatgaaatcattgtgtgtctcctggtagaagcattcttcccttcccaggagctgatatggtttggctgtgttcccacccaaatcttatcttgaattgtaactcaagatgagatttgggtggggacacaattcccatgtgtcatgggaggaacccagtgggaggtgattaaattatgaggggcgggtctttcctgcactgttcttatgatagtgaatgagtctcaggagatatgatggttttaaaaatgggagtttccctgcacaggctctctctctttctttgcctgctgccatccatgtaagatgttacttgctcctccttgccttctgccatgattgtgaggcctccccagccatgtggaactgtgagtccattaaacctctttcttttttaaattgcccagtctttattagcagtgttaaaacagactaatacggtaaatgagctaagacctctaggccaaaggacataaggtcatcagagcagaaagcaaaggttttactagtgggtcactaaggctaacagtgaatggtgctattttctccctttgatttgcaggcccatcaattctggctatgaggaaaacaggaccatgtattggaagctgattcagagcctacacagccttctggagaatcttaccccagccctacaagatattgccacctagctgacactgtaactgagtcttcaaaatgccattccactgttttatcaaaccagttgtttcaagatggagggaaacataagaccagtgaattccacgagcatgggcccactgcagcacttcatttgctgtgaagtgagttccttgatcagaagcagttttttatggaataccatgatggtggataaggcaattctttaagtccacggatggtagttttggccagaagcattgcatgcagggaagacaaatctgtatctatgccatctattccagtaagaaaaaacactacttcttccatgatggaagtggtccaatgtaatcaacctgccaccaagtcaatcacctggttggtctgacttggcaataggtcttgatattgaatgagtcaataaggatacataactgttactattcacaaattttaagaaactactttgacagctatatttcaatataattgcctttaacagaacaaatccactgagtgtggtgactcatgcctgtaatcctagtactttgggaggccgaggcaggtagatcacctgaggtcaggagttcgagaccagcctgaccaatatggtgaaaccctgtctctactaaaaatacaaacattagctgggcatggtggcatgtgcctgtaatcccagcaactcaggaggctgagacaggagaatctcttgaacccaagtggcagaggttgcagtgagccaagatctcaccattgcactccagcctggacagcctggacaacagagcgagactccatctcaaaaaacaaacaaacaaacaaacaaacaaaagaaacaacaacaacaaaaaaaacaaagcgaattattggtaaaatactggatgtatcttgtctttgattacaattatagattaatttagaatgaggcaatatcttttgtattttcttactggctaggcaatcgggaatagtcttctataagtggtgctaacaagactattttatttttcttttctctccactcagccatgtccccaatattttggacctgaggtatgaaaataagtaccttatttctactccccccaattgttctattgaatctagttctactgaaataattacatctctgttgctgcattccaatcatgagcttgattgtaatctcagcattttaggcacagtagaacaaggaagagctttccatcagaagtgatcgcaggagacactgttcattagttcgactactatttttcagagcacaccctgaaagtcaggagtaataccaggtaatttagggcttcaagaatggatgaaacatggctacaacagtaaaggagcttaatcaagcaagagagacaggcatgtagaaggccctgggaacccagaaaatggagcaggagactctgtctggcacaaggaaggtggctttatggatggaggtacatttacacctggtctgtaagaatgggtatggtttcgcatagtagaaaagggacaagggagaaagactggatacaaaagaaggggattagtggtggagcaattacaattagaggaggcaataaaaggagtggggacatagtgtattttagggaccacaaccagtgtctatggagctagaataaaaattatccgggtaagaagatgaagttaggtgttgctggaaaggtaggatgccgtggagactggacttgggatttgacaaccagtaactgaaagccatcaataacttctaggcaggggaataacatgatcagatgcgtgttagaaagatgactcaggagaccacatatttaaggaaaacaatggaatcacaatatcctgggaccattctgaatttggggaaacaaagagagagagagagaaagaaaagaatcaaagataccttttgaatgcctagcttaggtgagaggtttggtggtgacatccctaatgggggaaaggtcaagttagaggcagagaatcaaggtctggagatctagagagatcctgagtctgggaaaataaaggtatgagtcatctacatggaagtgatagttaaagctatgggaatgaaggagctttcctgggagaacgtctagacttgtgatgtgaagagccttgaggacaaaacccgggggagcactaacgggtaagagtggtgccaagaaagatgagtcagtgagggaaacaaggagaggaggcagaggatcctacggagaatcaagaaatgctataagaaattaggaggcaaactcagagcagcaaggtgggtgggagaattgcaataagagcttccaaagtggttgtggaagctaagattagaaatttgaattctgggttgggcacggtggctcacgcctgtaatcccagcactttgggaggctgaggcgggcagatcacctgaggtccggagttcgagaccagcctgaccaacatggagaaaccccatctctactaaaactacaaacttagctgggcctggtggtgcatgcctgtaatcccagctactccggaggctgaggcaggagaatggcttgaacccaggaagtggaggttgctgtgagccgagatcacgccattgcactccagcctgggaaacaagagcgaaactccgtctcaaaaaaaaaaaaaaaaaaaagaaagaaagaaagaaaaagaaaaaaaaaaaaaagaaatttgaattctggaggtgaagtgacattgtccacataggacaacatccgggtgctgttgtgggaaatgttgagctgagatgtaggtgaaaagatctagcaattcaaagtcaagggtgattcagttcctccaagaagaggtttacaggaggttatgcactgcttgagaggagcacatagatgagatgacaagtcacttgctttcagaggcctgcagaccaaggtggcacctgcattttccccacaatggagtggcaagatgaagaaagaccctccaacatgaaagtttgttttcgggttggtttattgcaatattgcagttggtgctccttgtgactgtgagatagtcaaggctagcgaaaggtaatatacccaaggtagagtttgttcaaatctatttggttagatatgggccaagccatagccttggcttcctgaccactaagctctcagccacctaagaagccgtcttcttctgaagcccattcctatcaagagcctattcctatcatttggtacgacggtgagctatccggggacacgcatgaagaggcaaatctcttcccaagctccatcttctgtagaagccaagcttctggtcctgctcttatctttttcatgaacattcgccagtccctgctgtcactcttgctccccacagtctccatctggcccctcagccaggttccctttgaaatgtaagttatattgtagcactcccctgcttaaaactctattgtggtttcccatcatgcttagactaaagctgagggtcaaggccatgatctaaaggccttgccataatctgtagcagtggatctcaatgtagggtgatttcacatccacccccaagatacctggcaatgtctggagacatttttggccgtcacaatttgtggggagaggttgctaatagcatctagtgggtataggccagggatgctgctagcattctacagtacacaggactcgccaccagctacaatgacaaacaattatccagccccaaatgccaatggtgccaaggcaggaagaccctgccctacagggccctcatactctggtcctgcctatcctgcgtaccctcgctgatgcattcctcctgggtcactctcatcctggccagtcatgctttcctcagatgcaccattgctaccttaggacattttgtaccttcttcctctgatgcctcccctaaatgttctccaggcttgccccttctcactgtgcaggtttctgccaaaacgctgctccttaaggctttctccaattctataatctaaactagctcctcctctcccactgccctcctgctttcttcacagcactttgatcatctgaaatgctatgacttaatggcctcgttctgtctttatcatctgtcttctttgctgggaggtgagctccctgagagcacggctttgtcccatccccagagcagcaccagcacttggtcactcaagagatagctaccaattaagtaaagggaagaatgcctgtctggggcctggctccctaagatgctgatcctggggtgcaatgacaggtgatccctgactctcttaatactcatccaacaaggactcttcaattcgattttgaagctgtttggccttacatttgcctaacacccacccaacacagcataggaaggccattggatccaaagggttacaagtcataggaccaaatgccaggcatcttggatgagcctgctttggtcaaagaaccttcactgcattctccttcactctggactttgggttttcccattcatgggttgggtagcatgaccaacctcaaacactagattcaagtgcaatttccaaccttgtttggactgtatcacgcaaagcacacgcacgcatgagagtacacgtacagggtcacagacatgttatcatatagggcatagatcctcttttagcaagccaaccacagtgttggtcaaactatttctattacaacataaatgcaactcaaatagaagcaagtctctgtagtctgagagttggggagaggtgagcctggtgaaagctcttcagagtgtcccacgggaacctagtgttcccaagcagggtaggtttggggttcaatttaattcatttacagtggaaacattttacagcatcgcatgaagttttcttttataaagtaaatttcgaacccacccatcctcataacttctgatctcctgtcagtaccagttttcttttttttttcttttctttctttctgaagagaggtctccctagggtaaaaagtaaaaacagcttttcctggaaaagttcatgctaccctcatttaccttttgcataacaaaagcccagactctaattctgaatagctgttttgtgtagttgaaccaggtgtcccgcttggagagactgaacattggaagtcagagaaatgccaatttgctgtgtttcaaaatactttgtttcaattgctgccaaagcctggggcaaaatgctataatctatttccagttgtagcttttcagctggctcagcctattttttaaaaaatttattaacatgcccaagtgacagtatcacttattaaccttattgatctgggaaaaattttgttaactataaaacatattcattatttggggttagtactagtgacttcttgacagcaaaacatccaagtcttagaaggtgaaaactgatttataaatacatagcaaacatgctaattaaaatacatcagtgatgtatgtctgtagattaaataatcagatgatattaagtgaaacggagaaaggcacgttgccactgtatttgaggtagactactgacacatctgattacaacatattttcaatttagagtgtgagagagacattctaccattgttagtcacatcacatctggtcgatccagtcctatatttttctgaatgtgccacatttgcaaagaaagatcttaaggaaaaggcagcatatggtttgctaactaccagagacatgaaaggctttcagataaatgcataagtctcattcattcaacaaatattttctgaggatttactaggggctaggtatgattgcagatgctgagtctgcaaagtaaacatatatacttatgtgaacacagtattcagcacctggggccctgcactgggattttatcagaattcttagacagcatttggataagcttattcctcatagatctctgctttctctctccaaaggatgaagctgaagactggagaagtgtatacaatggaaaggaatgggatctgtagtcaaagatgtggaatcaaactttgacacttgacaaactgagttggccaaatggttttacatccttgagtctcaggatccttctttataaagtaacccaacctcatcagggtggagtcatggcaaaacaaggtagggtatatacattgctggtggaatgcaaagtggtacagccacagtggaaaacagtttgatggttcttccaagagttaaagctaccatacgacccagaaattccactcctacctacatactgaaaagaattaaagacagatgctcaaacaaatacaggtactcctatgttcacagcagcattattcacaagagacaagagatgaaaacaacccgaacgcccaataatagatgaatggataaagaaaatgtggtatatacagacaatggtgtattattcagccctaaaaaggaatgaaatttggatacatgctacaacgtggacgtacctcaaaaacattacacccagcaaaagaagccagatgcaaaagaccacatactgcatgattctatttatatgaaatatctagaataggaaaatccacaggaacagagagtagattggtggttgccataggctgcgggagagggaataaggagtgatttttcatggccacagagttcctttcaggtgatgcaactgttttgcaagtagatagaggtagtggttgtacaacatcgtgaatgtactaagtgccattgaaatgttcacttttaaaatgatcaagattatttttgaatttcatctgagttgaaaaaaaaatgagtgtatatgaaaatattccttatatgtttttagtgacttacccagggtcactcaggtggttggaagatgggtggataaaaggctatgtagagaggtcagagggagtctgaatcttctagtgactcattctatttatttattaataatcgagcaataaacgtatatatttgtgaacatcatgatgctttgatacatgtatcccttgtggaatggctaaatcaagctaattaacatatgcatcaccctacttatcatattttttggtagtgagaacacttggtatttacactttcagcaatttttatgtataaaacatactgttattgactagagtcaccatgctgcacaatagatctccagaactgattcctgctgtctaacagaaattttgtatcctttgaccatcatgtttcccaaccctcatccccagcctctggaaaccaccattccactctgtgcttctacgagtttgactttttcagattccacatatgagtgagatcatgtggtatttgtctgtctgtgcctggcttatttcacttaacacaatgttctctcttttttaaggctgcatagtattccactgggtacatataccacattttctttatccattgatgaatctttaggtcgatctcctaacttggccattgtaaataatgctacaatgagcgtgggggtgcaggcatctctctgacataccaattttatatccatctagtgactctttcttgacagagaaaaacttttctctgaacctcccccaaattttccttcaggtctcactgcccaaaacgaggtcacatgactatacctaaatcagtcatgacagacaaatggagggggttgtcgttagaccagtcaggcgtggctaatccctttgcacccatacggtggccaagtgtgtgtacttaggaggcacacattttgtgctgtggagaaaggctgaacttcctcacaaagactcagaaacacttggcaaatctaaaggacagtcaagaaggagacataaaacagatacaaaactggatacaaaatatggtgactgcgttaagaagacctcccattggagacagctttacagaagagatgagagtaggagaatgatttagggagagaggtgggtggtgaatacagtgggcccttgaggagaaaacacctgggaagtcctggcttgcaactcctactctggaggtgaccctggaaaagtctggatttaccctgaatgaaccgaactctccccgagcttcatttttcttatctgtgaaaaaagggtagagacgccttcctcacagagacactgaaagaattatactcggagatggaaaaaaaatactgcctaatttatggtaagattagagactgtttagtctctagtcttgactgtcatcccaaaatgacatgattaaagatgggttttcactttataataaatattgtttagtaatagattaataaaccgacgggcttgaaaacagttcaaatatattgaaagaataaaagaaaagaaagaaagaaaaagagtgagagagaaagagagagagagaaggagggagggagggaaggaagggggaagggaagaaagaaagaaggaacgaaggaaggaaggaaaagaaattatcccttgaatgcctgactaccttcacacctaacataatcggaagcagaaattctgattggacgctgagttcctcaaaatcccccaaatggagtaatcactgttggttccctgcccagctccaacagcaccctgccatccttagaaatctccaacacatacaccatagacttggctcggaaccactcttcagggtattcatttcttggttccttatgcccaggactggacacataattttcaggacccactgcaaaatcgaagccccttgttgaaaaagaattaaggatctcaaggtggtgacaggggaacattaacccgagtgtggacccttctaagcatggggcctcctgttactgatcaggtcacctgttcatgaagccagccctggctactccctacaggtgagagatacaaattccttagcacgacatccagggctcttcagaaggggaccccagcccctcgtgaacacctcacagcttctataatgtttccctacttgagggcctttgcacgtgcccctctcagggtcaggggtgtgcatcctctctgttccatcatcacaccctccacacccacccagctcctccaaacccttaacccatcttgctccactccctagccccacactccttaggcagaatctggttccctagggtccccactaagcatttgtctcatggcacttaaaccagattttttataccttggtctcttcctataagaagatgagctccttgagttcagggaatattctctccttctgtgaccctggccttctctcacgcagtgtctgctgtctgggttcatgaatgagtgtagggctaaccgcctgcctcaatggcagtagattggaccattcacactcagacatgatcctggccagaacctcttgagtctatcggctgtcccaaccttgcctctgatgttgtgtggctccttacctcattcctcccccttttacttggttttaagctgcagggatgatagtgcctctcagatctcaactctaggcattcacatgcccattatcgagtgacttagtttgaattcctctaaaagcagacccaaagaaaaagatttgggccaagtattttatttggcgggtgatgccaggaagcactgtgagggagcagggaactgagaaagtagagggtggaaagctacaaagagacaccttgattagtaggttccattttaggcaaataggactcaggcctgctggggaccctctgaaaatttttggtgaacccagtccaagtgatcctaaccagaggtgaagaaactggggtatttatttgcaactgctgcctctcattggtaataggtcactctaggaacttgctggcacttccagtctgttctatacctgggtgtgtgtctgtggtcagaggatgccctcagccaggagatgcaagaggctatccacatggctgctggcagccactgagatagactgcagggaaatgggtgggccagtgatggcatctgctatgaagaggaatggcagttaaaaatccttggcaaaaatgttctgctcggatcatgaaacttagccagcgcatcaatgaccatactaatttcttagggttgctgtaacaaagtgccacaaattgagtcatttactgtctcacaattctggaggtcaggagtccaatatcaaggtattggactcctggatctgctctagatttctctctcagcttctgtagcctcaggcattcctgggcttataggtggctgttgtctctctgtatcttcacatcagctttcctccatgtgtgcctctgtgtccacatttttcccttgttataagaacaccagtcatgttggattagggtccaccctgatgaccttagtttaatatgattacctttgtaaaaaccctctttccaaatgaggtcacatttcttaggtactggaggtttgggtcttcaacatatctcttgggagggggatacaattcaacccattatgaccaaatgagagagattaccaccatgccccacacggtggccctaagtgggcgaacacctaacaaggaattgtgcaccttgtttaactaggtgttttagagcaggtcctccaaccaaccgccactgtaatttctcactttgctcacttacattaaagagaaaagtgggcccaactctttcagcaggaagacagactatcacccatgtcacacgcaggtaagtacatgagataaaagccattgtggctcacaaaaaccagtgggtaattctgtccaagtggaagattaattggaagctcttttaggctaagactgaatatcgtgggaggtatgtggcaagctaggagcaagtccacaggagagtctttgtcaaaactaaagtaattaaagccttcaaaaataggaccttgggaaaaaggaaaaaggaatttgataattttgcctgcagagaagcagactgaggtgtggttcacagttcccccgcatttgaaaggtggccagaggcactcccattcctgctgagaagagcgtgatgggaaaaaggcttaaactgaaggggagatttaggcggatgaactgaagaatgttcagagcctacaaggcatgggcactccaggattggttaactcaccataaacactttgcttttgcacaacacttaatgacttatgcagagtctctctacttgcttgtctcatttgattctcctgacactcctttgaaagggtagggtcagacacattgtacaaactgcaaagtgcagtgatttatgctcttagcctatacaatgcttcattttcgctagtccacggttcttaacgtcagcacaactgacatttggggctgcataattctcttgtcgggggctgtcctgtgcactgtaggatgtttaacagcatctctgcaatacaccaccccccagtagagaaacctcaaaatacatccagtcattgccaaatgccctcctgaaggaaaagtcacccctcgctgagaatcaccagtgagtctaaattcccccaactactgcttaagccctttaactatttttctatctcctggggagataaggaagtatcgctgttcaccatatacacttttgagacagatgaaaagacatagtcactgacttctgggagctcacagaccactgggaaatgggcctgccttctccccacaatggggaggtagccgtcatgtcatgtcttcaaagggcagaggtcacagaaagccttcagtctgcccagcatcgtcagaaagaaaaaatttctcagaaaggggagagttgaaactaaaatatgaaaagacaaatagggtttatctaatagatattgtcatttgtattatctcaagcttttaaacatagttttatatacacctggggtcatcagactatgagccaggggccaaatcaggcccactgtctgtttttataaataaagttttattggaacacagtaatattcatcatgtatttgtctgtggctgcattcctgctacaacagcagagttgaataattgtgacagagtctatatgacctgtgatgtcaaaatacttactatctgggccttagcagaaaaaaattgctgatccctgtctaggtcctggggtttgaagtacagggacctttactgaatgcttgtcctgtagacttgcatcacttttcattgctttaggtaagataatctactatgtaccaagctgtaaattaagtggtttgtatatgccacccaattcttctgttcaatgaccttgaaaaatatatactgttatcccaacaaatgcaaggtcaaagaaaataataagcttgtctaaatcatagaatgagtagacaggcagaggcagtatttaaactcccattttcttgacttcaatgtcattaaaacaccatgaacctcagtttcttcacctaccaaaagcaaacagttacctacctttcttcaatttacaagctttcttccaaattataagtgataggaatacttctaacaacaaaatgatgtgtaggtaacatttatccccattgtataattaagtcctaggtgagtcttctgctctgtattttatcacccctggctttgggaccagctgtgtcacatatgcaaatcatagcagactccttttacatgggtgacagctcacttcagtagaagcttccctccccatcacaaggctaagttggcaggaccagggaaacaaatacaactcaagcttggagttaaaagagtcgtgaaagcagagacatgcataaatctactttataaagggtttagaggtcctagaggccacattaaagacattccctaaatcagctcatgatggggcttcctgggtggtggtggagcttgacatgccccagagatctgacatttccttctctccaccccagctcaacctggtgggtgggagagctggtgggaactgtgcaggtggcttcaaacagtgggtaaggggatcttgcagcccttccttccttctcttcttccctgggtgttcaataaaaggcttcattggatgcacacatattactaggcatgtgtgtagaaaaatggcaagcattactattaattttggggacaattaatcaccagtacgaagcataatacacaaagcattttaaaatcatcatctcacttggtctctacaatgatcttttgtggtaggtgctggtatgcggaggctgaagcaactccatcttggaagctaatctaccatgttggcttctgattaacatcagttctgggaaggcttgtaagatttcctgtttgtctattatttcctaggtaagagcagatacttactgtaaatcctgcccctagattaaacaaccttggtgttatcgtacttccattgtcctatacatcccttcggaatccccctttccctatggtcctcaagcccttggtctggggagtaacagcatagggatcaaccatctcgtcttgccactgcccgaaatacagacatggcttctgttcctaagtccctattcaacttttctttctaagaaactggatttgtcagcctctttcttcacctctcagcttccttggactttgggggtaggtttgcgtagacatgctcaccacagacacaatatcagcttcattctacagatgaggaaggcaagccttggggagcttaaccaacttgtcgagactcatgtatataccaacactgaaaagcagatattccagactcccagtcatgccacaggcacacccctcagtgagaggtggggtttgtagttgaggctatttcctgcccagggagcagggaggcactctagcttccctgagctaacgtggttctgcttgtgtctgacttccaggtctctgccctttccaagctcactaggatgggcttcgggtgtgtcaaatgcctcagacagtacagatccacacagaatgggcatatgcaaccaatcagtgtcataaaaaagaaggaaatgactcgggccccctgtgtgttcaacatgtcgaaggtatctgtgcagcagaagaaagaggggcaaaagcccccagtgccacaggccagaggcagcagcttgggcccatgtgggagggtttgctttcccctgccaaagtgatgggctgctgcagcctggggcttgtgggaatccttcctgggcctgtgtgggaagtgtaggcagggagagtgctgctttcccaagctcatcccagctacagctacctttgtgctctgggattcaggacccccgagggggctggcaggagagtctctgttctcggatgggttgtcaccagggcatacatgggaagtgggctctctggagtcaccctccaggggacaatgccaattccagacacatttactggaacccctacactgatgaccttttgttgagggttgaattatgtccccaaaaaagatacattgaagtccaaacctctggtgtctataaatgtgattttatttgaaaatgaggtttctatggactaaattgtgtccctcccaaattcatattttgaagccctagcccccagtgtgactatacctagagacagagatctttaggaggtaattaaggttcaatgaggtcaggtgggtggggccctaaaccaacaggaaggactgtggccttactagaaaaggaagaaaaagcatttcctctcttctagtataaaaggacacagaaagaaggcagatatctacaagccacgaagagagacgtcactgagaactgaatttgtgtacattgatctggaacttccagcctccagaacttgagaaatacatttctgttgtttatttttttttcatgtaatcaattcatttatcatatatttattgagtgcctactatgtgccagaggatacagcagtaacaaaactaggcaaaaattgtgcctaaaagagggaagatgacttttcttaaagtgtggaataaagaaaagtaagatagcggatagaagcttgaagtgaaagcaggttcacaggaagtttctttggtcatttgttttgtttttaaatagtggaaagatgtatatgtttatggagaaagattgccttgaagatgcaagaggaagagatgatcaaaattcaagaagaagcagaaagtgatagaataaagagcacaagtggagaattagtgttaatgaaaagaaggatgcttcctttgatatgaagtgaaggaagagagaatgagtaaagaccaagacttgaagtccctagtttaatagagggagatttcttcttttgatagcaacaatggtattctgaattatttgaagacatgtcatatttctcttgtgccattttcctcccagtttaaacattctcataacctctattcctcacatgatgtttttccaggtcctttattctttggcactctcttctctggacacattgtattctgtcattggtcctaaaatttagatacccacaattgaacatactcctctagatatggtctagctaatgcaaaagaactgctgccttccaacttgttcagacatcatatgtttgttgtcaaacgctaagttgagttgttatcttttaagttttgtttttgttttttttttttttttttaattccaagaggtgcccacgttggctaagtaccaaacagggtactagggaattttacttctgagttaaatgccattctagttgttttttcttcatctccagtaaggttatctttattcaccagttgttacaatagctgtgggtcttgcttctcacagttttatgctgtctgtgctattttctctactgatcatcaccacaatcattattgcttatcataattgttatctttattttctcctttaatcaagaatcagtcttcctttatctcattattctcttttgcaggcttcaggataattatggttggagtgcactgggggaaccagtgcagctaagctctgacatctttgcatcccttttccatctgctgttttggcactctggtagaatagataacctaaaaacgactttaaaacatctagaaattttggataaaatataacaaacatccctttaaatgcacaactgatcttccatggaagtcacagaaatatataacgccaaaaagaagggaagctgaaacccagggctgtaaacatgaacatcatcttctctccctttttcttgtgacttatcttgtttttctcagctttggtgctaccaaggcttgactttaataggcatttccaatcaatgagagaatttcttttgctttcatcaacaattcagttattgatgttaacatatatatcatttgagtacttttcttttttttattattattatactttaagttttagggtccatgtgcacaatgtgcaggttagttacgtatgtatacatgtgccatgctggtgtgctgcacccattaactcatcatttagcattaggtatatctcctaatgctatcccttccccctctccccaccccacaacagtccccagagtgttccccttcctgtgtccatgtgttctcattgttcaatccccatctatgagtgagaacatgcggtgtttggttttttgtccttgcaatagtttactgagaatgatgatttctaatttcatccatgtccctaaagagcttctgcacagcaaaagaaactaccatcagagtgaacaggcaacctacaaaatgggagaaaattttcacaacctgctcatctgacaaagggctaatatccagaatctacaatgaactcaaacaaatttacaagaaaaaaacaaacaaccccatcaaaaagtgggcaaaggatatgaacagacacttctcaaaagaagacatttatgcagccaaaagacacatgaaaaaatgctcatcatcactggccatcagagaaatgcaaaccaaaaccacaatgagataccatctcacaccagttaaaatggcaatcattaaaaagtcaggaaacaacaggtgctggagaggatgtggagaaacaggaacacttttacactgttggtgggactgtaaactagttcaaccattgtggaagtcagtgtgctgattcctcagggatctagaactagaaataccatttgacccagccatcccattactgggtatatacccaaaggactataaatcatgctgctataaagacacatgcacacgtatgtttattgcggcactattcacaatagcaaagacttggaaccaacccaaatgtccaacaatgatagactggattaagaaaatgtggcacatatacaccacggaatactgtgcagccataaaaaatgatgagttcatgtcctttgtagggacacggatgaaattggaaatcatttctgttgtttaaaccacgaagtctatggtatctggttatgacaacctgagaatactaactcaagggtctttcgcagatgtcattaagttgttaaagtgaggtcattatggtgggtcctaatccaagagaagagatgcatggacagacgtgcacaacgggaggaccaagccaagacacacagggagaatggccatgggaagatggaggcagagatcaaagtgaggcacccacaagccaagaaatggcaggagctaccagcagctggaagatgcagagaagcattccttcttagaggtttcagagagagtatggtgctactgacaccttgattttgaacttctagtctccagaactatgagagaataaatttctgttggttaagccatcgagtttgtgtaagtttgttataagagccctaggaaataaacatatccatttattcaggaaagcctgctagagtgcaaatatttggaaaagatactactatgcaaatgtttgaaaaagatattgctcttgattctgccttatgggtttttcatttctgtaagctattctcaaagttttgttcttggactactattggtaattaagactgcaacatgtttggcaacatcagttgagaactgttgctctgggaacgttttcggcaagcctcagcccttcttttcccttggcttgcattgaggagttaggtgatactctgctgctcaggcccagcacctttatggaccgtattcccctggtggaatgaccatctctgcttgctctgattggctgttggggttttctagcatgccctatttaatatgtatgatttatctcttacttcagttggaaggtacagttgctctgtagttggcatgcagtcatggtgactatgaaaatataaaataatgttttggtttacagacacttagaaataagttgtgtctcaaaattgggtgactattctagttatctgctactcaatatccttgtgcgagccctctttacccagaatcaaactaaaccatgaggggcactatagaatgtcacccctgggtccaggatactatggggactcagaagccaagctcccactgggggatctagggcatgcccccaaggtaagattcccacctctttgttcagcaggaagcacccatcacacaaggaggtaggaataaacaagcattcgtcaagaacaaaagatacagatgttctgctggagcttggatacatagcataagagggaacagttctcacaggtaagagtaagttttcctctggtggtgacagtgggacctgtgggggagagaattgggagtactgacaggaaggcagagtggctgtccaaatgaacggattgtttgcacatggcctttagggcacgttgtgttagccttccattgctgcttatattagtctgttttcacactgcccataaatgcatacctgagactggataatttataaagaaaaagagccttaatgtactcatagttgcatgtggctggggaggcctcacaatcatggcagaaggtgaaaggcacatcttacatggaagcagacaagagagaattgaggaccaagtgaaaggggtttccccttataaaaccatcagatcacatgagactttttcaccaccatgagaacagtaaggggaaaactatgctcatgattcaattgtctcccactggattcctcccacaacacataggaattatgggagctaaaattcaagatgagatttgggtgaggacacagccaaaccctatcactgctgtaatcaattcccaccaacttagtggctcgaaacatcacagatttatgatcttatgacggtggaggtccccaaatggatcttctaggtctagaatcaaggtatcagcagaccacttcttttggaggctctggtggagaaaccatttcctcgccttttccagcttctagaggctgcccttctcattccttggttcacggccacactcatttccatctctgcttccactgtgacaacttctctgcctcagaccctcctgctttgcctttgtaaggacccttgtgatgagatcaggcccatccaggattatccctcatctcaagacctttaccttaatcacatttgcaaggtctcttccactgtgtcaggtaacattttcacaggttccagggattagggtgtggacatcttggggagctggaggatattatttcatctaccacacacatctctaccttgtacaggcaagcacttgcaaagtgcaatgtgatcctctggagccactgtcctcccagagcttatatatactctgaaagtcaactctcagaccacagcctcctgtccatgcaccactctcatcaacacccccacccgaaacactttcactccaccctctttgtcccctaactcatggagaagaaaatctaattagtaggagtggaatttggctttcatctttaccagtactagaaatatggtgtgtgtctttttgtaaaaattctctcaactaaattgtttttattaatttctgcaaaatgtgaacatcaactcccttcatgtgaatgtcaataagattaaatgagctgtctcagctcctagcctgtgcaagctaacagctcaggagatgtttatttctttccctcttctttccttaatgaagccctctcctttgacatcttcaattctggagcgcttcttttctgaggccttggctcccccacattgcccacccttttcctgctcgtccacatttctggcttctattctcttgtctttaccatctccctgaacaatgttatccgttccaatgacttcaacagtctctccgcttacatatgatgcctctcaaactctgatctccaactcttccaaagagctctggacctttgttccaattacctgaaaaacatcttcttggatgtcccattagcactgttaaatcaaacaagaatttccctccctcctgccttgctgtagttcccctagggattcggttgtgtgggaagatgtgtggagagctcttagttgactcccttctctgcagttctacctctctagagacttggaggacccactgtttccgcctcgctttttcaggcctagagattgctcgctcctgggctggctgcttcataattccttattagtagtttcccaagcttacatatctgtaaatatttactttagttaaattctccccaatttccacaatatgttggctgcacatgctttctactaggagtcacacaactatgataagaaccaagaaatattagtaaacgttttttaccattattggcctataccctggaatagccaacaataacctagaacctatgcaacaagaatatccaacaagaacctagagacctgtcagtctataggtgggaactacaggatgagattattttgtgtgtgagccaccattgtggaaaatgtgcctctacaggagcctgagattaccttgctttgtgttgtgttccttacttttttcaaagagttcctctatatctgctgatgaaactcttgaggcttgttttgaagcaagtcataggttattaatgccctaccccatttctcatgcttttgcccaggaacatttcaatggcaaatacataccttgggcccaagtttgcagcttctcagtcatctttcttctccactgagctaggagcactcactctacaacagatagttttttatttttatttttatgtatttattttttaacccttacaacttttctttggcagattcctgaagtagaaaatccaacaaaaaccctctgattacaatggaatgtaccagctcatgttggaaaaggtcactccattgcatgacatcctgtgacacatacagaaaatcagcttagtcagaagcatgtgtcatatgagtaacatttggacctgaattgagcattgtgcagtatagcttcagcaggtgctcctatcactctacagtaccccgtgtcaaatgggcaatgccagatgatgccaagaagccccagtgagtgagtgcagaaaaatctccagtgtctgcctgttacaagtggtctctgcacccagtacactgcagtgcccaagaatgagaccatgtccaaagccaaatgggggaacaccaattgaaaaacggaagctgtgaaggccaaacaggggaagcacagagtgttggccttaacttccctgaaatttgttcaagcagctttggacatcacaaaaagacaaatcaaccattggcccatggtggaggaaacactcagagaagggacaaacggagtcaagtgtgacaaggggcaagtgtgaggctcctatttgagattctatactcgaggtagtaatagatgatttgtctccaaattccaacagcagaatatatgtaaaccctgaattaatcttcatttggaaaacagcatttcgtgaataattaaaaataaaaggaataaatgttaccttcaagtgggtgggaattgactgagaaggagcatgagagaactacctggagttatgggcttgttctatatcctgccaaagattgaattgtacatatgcatgcatttgtcaaaagtttagaatgatacctgtaaaaacttttgcatttcacttcaggcagttttttttcctaaaaatatacacaaagaaacattgaactattgctaatgatatgcacatagaagtgtttacagatgacgtgtactcatgcctgcaacttgcttcaaaatacaacacaaataacatgggctgatggatggatagacagatggatagagaacagttagataataataaagcacatctaacaaactaattattgcagattctaggtggtgggtgtgggtattttctgtacaattctttttatttttatgtttgaaatttttcatttaaaaatgttggaaaaaaaactaaaagaaactgataagagaaaccctagggcttctcatagagttgaaaatatttcaacataaatgccattaatctgaaaaattatcaaaatacttcttttagaaatgcagtccatgacacaagtaatccaattaccctcaaactaaacctggtcataaaaactggtccctagggagatcaacaggtatttacataggaaaaaacatgaaggttgcaagattataagaagtgcatgatgctgaagaggacatttctaaaaaaacattttagggctgaagactgattcagtccttacccctagcatatccacctgctgttcccccacctctaaaccactaacttcactgaagtcaagagatgtgactcatttatgggctatgggcaactgctgggaatcctgccatatggttgaagaaaatcacagactcatacttgcagctgcttaataacatggttaaaatcggagccctttagctcttatcttttgtgtaaaatgtacagtttgaaagatccacatctttttctataatttaatattgtattatttttcttccagctttattgatgtatacttggccaaaaaagtaggtatttaaggtatacagtgtgatgttttaatctacataacattgtgaaatgattatcataatcaagctaattaacatatcacctttaattacctttgcgtgtgtgtatagtgagaacacttaagatctactctctcagcaaattttgagtattcaataaattattattaacaatggtcaccaagctgtacattagatcatccacaacttattcatcctataactgaaagtccacatactttgaccaacattaccccaaggttcatatcttgactgtctttttggagtgagtgtcaacaagatgactctatttttatgtcaatgtctgacttacataatagaaggctatgcagtgagtaccttgtgcaaaggagatgattaggaaacactggttcgtgaaagaatgaatgcatggatgggggcaagatttatcagagatgctttggaagagagggaagggatgtgattcattcaaacagaaagaagatttgacatggatcaaaataatgtaaagaaaaacactaaagaaaattattaacccggaaggagctggagaaagatgcaatgtattgtgaaggctttggaataatacagtttttctgtagcctgggtgtatgacctttggacaaacgctaaacctctctgagcctcagtttcctcatctgttcaaaataacaataattatagcgcttatttttagagtcattgtgagaaatattaaataagatgtaaagttcccggtggaggctacaggagacccaaaacaaaaaagggaaggtgaataaaaaaaggtttcatctgctggcctagcctgttgggctggcttacagttgaaaaggagaaaaataccacaattcctgttgagatggaaagtcgccattgttgggtcctgagaagacaatggaagaggtcgatgaagtgggagaatcacagaactggccacagtgcttaggtatttcttgagaataatcccactaggagatatatttaaggaggataaatacattcctggcggaggtggagttggaaaaaaatgtgagtggacagtaatcaccatgggacagatggaacactaaggaccccaagggcttcaggattaaatgctgtttctaattaagccaccatttgcacgacaccagcactgatcattaaaaaaaattttaaattttcatcattattaactgcatctcatatctgtaattctgatgaaaggataaaatagaagagatgatggttatggatatatttcattgctaggtcaaagaagagcatttcaagaaaaacaagagcggaactaactcatacatttgatgacgtatagggagaccaggcaatcaggctcgaattctagtgaaaattgcacagaaccctcaagaatagtgtttcccactgctttctactccagttgagtctgaagagttgttcctcaaacaggacaaatttagattattttagtaacttattccatgaacaaagatgaaatcttttaatggcagtagaaggcagtgctgcaaacagaaataactccttaaagaaatggaaaacaagtattttattgcactcacagtatatacaaaacaacatgtaatgtacaacaaaattcctccttaacatcttcttaggactaaatggagaaaaatactgccagtggaaaatcttactaagaaaaaaatcaatcaaattcttaagaaagcccgcattcattatctgagcctagatttctcaagtatcaaagatgacagtttttgttaattagaaataatttaaaagcagttttccactaagatttttgcatattaactaaagttacatggtagaaatattatagaatatactgatgttttctttgataaagcaaaaagaaggaaaagttggtttatctttcccaacatataaaagccctttgacgttgtgcttgaggctgaaagaggctcaaatagtttactgcaatatttctgtaagtcacaggctacatttttttttcaatagtacggggacatttttgtcattggccaaagactgttttgagagatggagaaactttatttgtctaccaaaccttgtaaaaaaaagtctgctttcttcaccccacctctgtgttccatctgggggacctacctccaatatttgctggaaatttcatcttgcttgtcagcctttcagatctgtggaaaatttcgttccttttttttttcagattattattattattattatactttaagttctgggatacgtgtgcagaacatgcaggtttgttacattggtatacatgtgccatggttgtttgctgcactcatcaacctgtcatctactttaggtatttctcctaatgctatccctcccctagccccccagtcctcgacaggccccagtgtatgacgctcccctccctgtgtccacgtgttctcattgttcaattcccacttgtgagtgagaacatgcggtgttttgttttctgttcttgtgttagtttgctgagaatgatggtttccagctttatccatgtccctgcaaaggacatgaactcatcttttttttatggctgcatagtattctatggtgtatatgcgccacattttttttcccagtctatcattgatgggcatttgcgttggttgcaagtctttgctattgtgaacagtgctgccataaacatacatgtgcatgtgtctttatagcagaatgatttataatcctttgggtatatacccagtaatgggactgctgggtcaaatggtatttctggtttagatccttgaggaatagccacactgtcttccacaagggttgaactaatttacactcccaccaacaagtgttaaagtgttcctatttctctacatcctctccagcatctgttgtttcctgactttttaatgattgccattctaattggtgtgagatggtatctcattgtggttttgatttgcatttctctaatgcccagtgatgatgagcttttttttatatgttttctggccacataaatttcttcttttgagaactgtctgttcatacccttctcccgctttctgatggggttgtttttttcttgtaaatttgtttaagttccctgtagtttctggatattagccctttgtcagatgagtggattgcaaaaattttctcccattctgtaggttgcctgttcactctgatgatagtttcttttgctgggcagaagctctttcgtttaattagatcccatttgtcaattttggcttttgttgccattgttaatggagttttagtcatgaagcttttgcccatgcctatgtcctgaatgacattgcctaggttttcttctagggtttttatggttttaggtcttacatttaagcctttaatccatcttgagttaatttttgtataaggtgtaaggaaggagaccagtttcaattttttgcatatggctagccagttttcccagcatcatttattaaatagggaatccttttcccattgcttgtttttgtcaggttagtcaaagatcagatgtttgtagatgtgtggggttatttctgaggtctctgctctgttccattggtctctatatctgttttggtaccagtaccatgctcttttggttactgtagccttgtagtgtagtttgaagtcaggtagcatgatgcctccagctttgttctttttgcttaggatcgtcttggctatatgggctcttttttggttccatatgaaatttaaagtagtttttttctaaatctgtgaagaaattcaatggtagcttgatgaggatagcattaaatctataaattactttgggcagtatggccattttcacgatattcattcttcctatccatgagcatggaatgttttttcatttgtttgtgtcctctcttatgtccttgagcagtggtttgtggttccccttgaagaggtccgtcacaccccttgtaagttgtattcctatgtattttattcgttttgtagcaattgtgaatgtgagttcactcatgatttggctctctgtttgtctattattggtgtataggaatgcttgtgatttttgcacattgagatattgctgaagttgcttatcagcttaaagagatttggggctgagactatggggttttctaaatatacaatcacgtcatctgcagagacaatttgccttcctctcttcctatttgaataccctctatttccttctcttacctgattgccctggccagaaattccaatactatgttgaataggagtggtgagagagggcatccttatcttgtgccagtttctaggggaatgcttccagcttttgcccattcggtatgatattggctgtgggtctgtcatacatagctcttgttattttgagatactttccatcagtacctagtttgttgagagtttctggcatgaaggggtgttgaattttatcaaaggccttttctgcatctactgagataatcatgtgttttttgtcattggttctgtttatatgatggattacgtttattgatttgtgtatgttgaacccgcattgcatcccagggatgaagccaacttgatcatggtggataagctttttgacgtgctgctggattcggtttgccagtattttattgaggatttttgcatcgatgttcatcagggatattggcctgaaattttttgttgttgtgtctctgccgggttttggaatcaggatgatcctggcctcataaaatgagttagggaggagtccctctttttctattgtttggaatagtttcagaaggaatggtaccagctcctctttgtacctctggtagaattcggctgtgaatctgtctggtcctgggctttgttttgttggtaggctattacttactgccaaaaatttctatatattttttaatcaaagtgttaaaaggaaatacttgtcatgtaagcctaaaggaaaattcatactttttcgactcataaaaacacagatataagcaggtaagaacattcggacatggatgaaacacttcccagtatgatttacagcctgttatttaccttttcttaattgacttcgtgcctttaaatcacaaatctcaaagatctcccttctctaaattttgtatttagaaatggggacgggtgatgctccttatctgagtaacctggatttactagaaagtcccacaggagtagatctttcctgttggttattgcaagaatcagactttgcagggttatgttatagtaatatattataaatacccccaaatctgagaggcttataaaaatgaagtttcgttttccactcatctcatgtgttgtacattacctcctccatgccggcatctgaattaaaggagcaaccttttgctgagagtgttagccaggagttgccgtcaatgtgaacttagacccatcctgcctttgtgactgcaggccaatgcttaggggcaagacagccattttgaagccaccaaaggctctaaggatgctagaaggtgcagaattgtgcacacttcacatgtggctaccagcaccagaatgggtgaatggcagggccatgtaaatgcgagtgtagaatacaccaggaattaacctcctccctcagtcttttcatgctccagctaccggtgaaagccacatatagaacttctaaatctgatgcattgtaatgcacatatcatcaattagatatcccacttagagtcaggaaactggataggtcattctggccaggatgacagtgttgtctacttggaatcacacaacctgtaaataaccaggaagttcaaagaaatcagactaattttctgggaagtatgacaacaactaacatttaatgaacacttcccatgtgcaaagtgctttgtatgcattatctcctttgatcctcacatcagccggatgaggtggcttttataatgctcattttttacaggtgagggaaccaaggcttaggaagattaagtaacttgataaagatcacacacttaataagtggtagagtctagatttcatccaaggcagtctgatttcagaaattcctacttttaaccattgtgtagtccaatcctaactgatgtttgtaatcttgaacctgggatattgtaagagtcagaagtgcctttggaatcacaaacattatgctccacgtggcctttatgttagattcattttgttaaaccctaactcagggatcaacacattttttctataaaggaccaaatagtgaatcttttaaattttgtggctaaaagcagctctgttgcatattctttgttatttttacaatgctttttttctttttgagatggagtcttactctgttgcccaggctggagtgcactggcgtgccctcaactcactgcaacctccacttcccaggttcaagtgattctcctgccttagcctcttgagtagctgggattacaggcaccactaccactcccagctaatttttatatttgagaagagacagggtttcaccatgttggccaggctggtctcaaactcctgacctcagttaatctgcctgcctcagcctcccaaagtgctggaattacaggcgtgagccgctgcgccaggccctacaatgctttaataaaggaaaaactatgcttatcccatgataccatataaaaaaaaagatatgggccagatttgttccccaagtcaccatttgccaacctttggtaattcatcaaagcttgatgcactgggtatgacatatgtgtaacctctctgccaattatgtgattaatcagaatatgccatttacaactattctgacacagtggtgatttactaaaactagaaggtgagtttgggttcgtctctctataacttcataaattggtgatcttgagtaacctcaatgtggagtcagagtcacatgaggacatctcaaatgtctccttgcagcaaggcagtgacctattcagcccctgttgtactcctgaaggtggcatcaagtgacactttgtagtatgcatgtcattgctcttgacgatttcaattaaaaatgccagtgagttttactgaaattgaaagactatttacaagcctcctctttctcaaaagacatcaaaaccacagcaaagagtgttggatccaagataatttacagagtaataaaggcccacagaggatgccttgagtttttgacgtcgtgttgttggaagtcggatcaggaagggtgaagatccacattactaagccagcgtgtctatagaactgtgtaccaggcacagtgctaagctttacacatattaatagttaatacaaccacttcagaaaggaggtaacagttttacccccacttttcagatgggaaagccaaggcagagaaagctagaggactcatttgagtttccccagtgagtaaatgataggtggaagactgggaccccggtagatcggcttgagtccacgaccatggccactatgctgcactgtgcttccatggccagaaaatggctaggcctatggaggaaaataaccactgtgtgaagaacaatatttaatttctgaatgaagtacattaaattaaaagattgatgttattcaaggcaactaggggatactgggttctaattctgcttttaccaatcagctaattggtcactatggccaattagtcaaatggagtgttgcgtttgtcagttttcatgtaaaagagaagtgttagtatttaacataatcttttgtgttagtatgttaaatgtttttaaatcattttgagacccccttttccaaggagtcagtcatatgcatgcagcctgccacactctgagtaccaaggcccatggcctcagggaaaactctaagcccgggtatttagtttcattcattcattcttcaggagagcaatatcttctcatctgcataatcaaagggtcagactgcatatctctaaggtgtcttccagtaattatattttttttgtttgatgactacaaaaggatttactcattgagggaagtctttacttgctgaaaaatgtctttactcactaacgaaactttgattaaataaagctctaaagatatctattgactgtagctctttgcagcataaagtattttttcattgactacaagataaaatgtccttaatattagatcagcattaataacaatctagcataataataaccatgtaaccctactttgcaaaagactcagccctttagaagggaaaatgaataaacttaactcattcttcttcgagggccgagataaaaatctcaagctatcctagcattaggagatatacctaatgtaaatgatgagttaatgggtgcagcacaccaacatggcacgtgtatacatacgtaacaaacctgcacgttgtgcacatgtaccctagaacttaaagtataataaaaaaagaaaaaaaaagagaaaaaaagaaatatttttaaaactgtaaactgttaaaaaaaaaaagaagatgtgaactataaaacacacacacacacacacacacacacacaaacaaaaaaaaatctcaagttatcctttagatagtccaatctgctttaaactttggcccgagttattttcacgaacatcctctgtttccaatggagtagataccatataagacagaacactacaaatcactttgtgtaaactcaccaaagaaagggtggggggggggagaaaaatcagcacagagtctgctcttaattaaaaccagctgatgatgtacagcgatttgtctggagcaccctggctgcgctggttccctgacagctgaacattctttcctgcctgtactgtttgaactatgtccaatggtgaaatcgttaaacctttgataactgtagtttaaatgcgagaagggagcgggggagctttctgttttaagcaagaaagagagatgagtgttgtattacacaaattaacagttaaaaagttagtacttattagatcattttcactggcttttggtagaatgcctctggacattttcagattacctattgacactttttcacggcacaaatgtcaaaaatctcacttcctctcttcttccctaggggattcttgctgtagttagaagggaaatagtatgaaccacctggtcttactcaaagaagccttggggataggttaatttcacagttgaaagctccatgtgggggatacatttacatatttactaatacagaaagggctaccaaaagaaaaaaatcatgtgacttcaggagaactgctcacaaacacacaaaacactctgtttcatccttgagtttgacagatgcttgatagggaacaaagaataaccaagctgttcatctccaaataccaaagtaactttaaaatgaattgctgttcacagtttctggaagacaaatcggcattacgaggatgtaaataataacctgtctgtgtgttcatacacaccctaaacgtttaaaagatatttttaggtataaaatatttcaaaaacacaataccctttctaaaacagccatcatgatatatctgtattataggaaagtgcagatatatacagatagtacgtagttatattcatagaaacatagatgacagatgggtagataggtagatagattaatacttagtgtttcaaattatacttggagcaatttttttttttttgagacagagtctcattccatcacccaggctgaagtgcagtggcacgatctcagctcgttgcaactcgtgcctcagcctcccaagtagctgtaattataggtgcgagtcacagcacactgcccaaatttcctttttaaactttggtttcagcatagccctgtctactacttggaggtgattttggtgtttggatatgttaatacatttttgccaaccatggtagccatggggtctggcacaatgctgtaaccccattctttcaatagaacgaatgccccttaggctgtaagtgtggcccctgtttcctttgaagggcttttagaaatagacagagtgtcttttccctgggactctggactcctggggcaaagctttttaagacaggtgtgaaaattatcctggttgattcagaaatgagtcattgtctcctggctgctgctactgatctcaagctagcaaaggtcaaatgaagttctggttcacataaagacattctatgctgagttttaagcatcactggggagtcttccaattcatttgatttgggagagctcaacaacattgctgatgtagttatctttgtccagttaaacttttgccagacaaccatgggacttctggcccacaggaaggtaagggaagatagaaattagattaaaagacacccaagtccaaacacaatttcaccagacaggtaaatatcttaatgccaattagttttgacaaatatgagacatatttggctttgttctatctaggggtactttttcatttaatcaatctctcaattaaaattctttagcattgcttatttagagtcaaataaataaatatatctgtctgggtataattcatttaaattagagcacaatgtttgctctatttgccttacatattgtcattcaggaaacataagtactcatgaaattttgatttctattagttaaactgtataagcatgaaggagttagtagggtggtaagccatgtgggttgtctacactcaacgcttttctacctccacacatctccttgctcagaaagctcccctccaccagcgtcccaaaatatcagagagtagatgtatcagcccccatgcagctgggctatgagtattggctgtggactgggacctgaaggcaggcatctcgagcactttggaaaaggttttcttctctaattacaaagccctgcctggaaggacgtgtctcccttctccggccagctgttgctgtgcctacaagtgacctccgtaacaattaattctatcttgtgacctgaggattctgtgcagaacaagagacacagcacagatttttgatgacatcaacaagccatcaaattgaccctctactcacttacctctgagcttcaatttcttcatccttaaaatggaaagaataaaagcatttgctttaggttttttgatttttgggggatgtgagaattaaataaaataatgcaaataaatccacttgatattatgccaaggacataagacatgcttgtttttagcttctatcattatttttattaccacttacaactacatgatactatgttttcagagaaattgaaatagttcctaaaagccttcatatgttcaacaaagatcataatgtaagcaggagtaaaatatctgtcagtcagtacatttcttacataatcaatgcttttccagaataatgtttttaaaaaacattttgaggagtaattctgagagagacacctggatagcttatgaaactgtttagttctctcacataggatctgccaaattgctgacttctgcaaaaaacattaagaatttaaaattatgaatatggaataatagtttttaaatgatagacaaatatttccatattttatcagctcctggattatactgcagtttcacacctgcactattttaataggctaccttgtggcccaatggttttaatatgtattcaaccctaaataatcactcattaatcttatatgacaaccagatagtaatatttattaatgtgctattgtcaatagcagactttatgctacttatagtatctgcatttttccccatagtaaagtttcctacaccctaaacagctcatctcaaaacaatgacaaccagatattcttaacttcatgaaaaattttatgaaatacatgtttgtaccaaaaagcagttttaaatcctctcttgaaaataattggcagaaaattacttaatggaatatcataatttattttataaatataaataaatgtgagcttgcctagatcactttggcttaaatacaaatatatccattgtttttaaaaagtgtctgttgtaattattaaacctgctaaggagagggcaagatacctgtagactgttaacacatctgatgatgaagccaatgataaggattttaggggtaaaatacgacttcagtttggttgagtggtttgttttctctttgagcattatacctcctccctgaagccccttcagatcatttttctaggtcttaggcacctgaggtgggattaagtactctcttcacttcccatacaggcttccaaatcattatcctctatgccctctaaatatcattgctccactgaggttaattctctacatatcatcttttccacttgtttcaattgtctgctgtcttccaagccaatcctatacatttatcaaaaaatctagcctctgagacaaagttttctctccacccaaattccactgatccaccataatctccagtgactttggagttcagatggatgacccctctaatgtcttcctttgtccatcttaacttccacatctccagtggccttcatctctgctccatttcaggtacttcctcttaaggttaaatcctggaatttttccatccttgaattctcaaatacaaatgttccactttctgataaaaaattttcattcattgggttttactgttactcctaaaactatgtggtttttagatttaccaggtcccttggtacctaatgttctttcagaatcagcctctcctggcctcttttcctcccctggatcccatcattaaaataacgaggaccctcaatttccttgccctccatcattctgtaacaccccctcaacaaaactacaaaattggatcaatgtttcaagccacattcttagttcctataacaaagtggttggatactgttagaaaaaatatattatttgatatatcagataggttcccaatatctcccataaatttatttacttcctattcagggactcattttccaatacccttcaatgtctatgaaaaagctccatcagtcttctcaagaactctatctcatacaagctcattaattttggcagacaaacttgccactttaataaaatattaaagtaaacagacagtgtcttccccaactttgttgcaagtgttatctattttaatatatgtataaatcctgaacatctgtaattcccatttcagtccataaggcatctcttttttttgttgaagtctccaagttatgcctttgcatctctttccttctcctcaagtctttttcattcatcatccctactctgtcccatatcttcaatctctccaatattccaatctcagctagaacctgcacttcggactactaatacatccaggttttcccaatttaaacattccttcctgcattgaactttccaggtggttagttttggtgaactaaccaccaacttgttctacatattcccatctgtattagtccattttcacactgctataaagaaatacctgagattgggtaatttctaaaggaaagaggtttaattgactcacagttccgcatggctggggaggcctcaggaaacttacaatcatagcggaaggcaaagaggaaggaaggcacatcttacatggcagcaggagagagagagagacagagacagagagagagagagtgtgtgtgcgaaaggtgacataccacttttcaaccatcagacctcatgagaactcactgactaccgtgagaacagcatggggaaaattgcccccatgatccaatcacctcatgctagctccttcaattgatacctggggataagaattcaagataggatttgggtggggatgcagagtcaaaccatatcaccatcttacctacaggtcttcaaaacagcaatatatatttcctatatgcactttacttttttctcatttcttccttggtcctttgcaatctgactttcatcatagtacccaattataatagttttctcagtaggaaatcaataatatttttactgaagattctaataaaaagttcattttttaatttccatgtctcttggtgtcctagcctcttttgaaaagagactggacagacacgccccaagccagatggaagtcccggtatggcaaactaaagagcttggacttttccagccaaattttgaagagatcttgaaagtttattctcatgaagctttttaccttttttgcttctgtgattttgcgctctcatggctctcctttcacccttcctagctctttctcagacacattttctcctgctcatcagtgaaatgtttttgctcagaagtctatcctcagcttgctatcttctcaccccacctggttatttcctgggtgatgctgtccacgcccatgctttccaatgcctggtatagggcatagattccaatgtggacaactttcatgctggcctccaccacagcacgcttcagatgcacatatccagctgtttattgcacaccatacaacccacaggtatttcatactttctctgtactacacagaactcaaaatctttcctacaaatttctgtcttcctatctgttccctatcaattcactcatataatttagagaaatggaacttgcaggcatcattgtgcctttgcccttaaccagtcacactacaacttctttttactttattccaagttatttcttgatttttcctatctccacctcctctccacctctcatgcatttctactctggcttctgcaggcccctagtcatttcttgccttgattaagtgcaagagcctctaatcattctttccaccatcaacagtgttctcctgaaagccattccctggagtcaccagaattatctggtaccaaatcaaaccaaaacatggcacgtcccttgaatgaacccttcagtggctgctatcacctccaaagcaaagcccaagtgccttagcaagaactttggtcacctccccaggaaatactctcactcctcctgactcatgcatgctgtcaatatggaactcctaaagttctcaaggatgccctgcctggaaggcttccaaacccactttgtcacagttctccttgaagggtctgtgattcagctcagggactatctctttctgattcctcttatgacaccttaggctagcctaagccctctcccttctatatgaataaaaccttatacctgcacctattatttcatttactttataatgcatgcatttttgtgtaatatacatatatatatgtatatgcacatatatgtatttatgtatatctatatacctctatctaatctatcatctatctctctagtcattgcacttgctttacaatgattcacatgagtttgtctaaccctactcatctacggacaacttaaatccagtaatgaacttgttcagtcacctatgaatctccagtgactactgtggtacatggactaaacaaagtctgtattctatcaatacttttggaaggaaattatgaagaaatacagttccatctctcccacaaacagatcagaatgtacggaataataactggcttgcataatttggatatctgtcccctctaagcctcatgttgaaatttgatccctgttgttagatgtggggtctagtaggaggtgtttgggttatggaggtgggtccctcatgaatggcttggtgctgtccttgcagtagtgagtgagtgttcactctatttgttccctcaagagttcaccccctagccggttgttaaaagaccttggcacctccctcccctctctcttgcttcttctctcaccatgtgacttgcacaagcctgctcctcttcaccttccccagtgagtggaagattcctgaagctcttatcagaagtagatgttggtgtcatgcttcttgtacagcctgcagaactgtaaaacaaataaacctcttttccttataaattatgcagcctccgtaagtattcgaggagagctttctatgtgctcagcgctcttccagctgctagagatacagcagaaaacaagatacgagaagtccaacttagcagagatcacattccagggtgccaagtatcctgacaacataaaagtcagcacataaatgaacaaaaggacttctgacagggctaagtcattcaattaattttagaaatatttattgaactcctgtgtaagggtcagatactcttctgggtccagagcgtagagaaagtaacaaaacaaatatcccttccaacatggaacatacagatgaaattcaaaaggggctggacaatggtagagagtgacttggtataggagctacattcaatagtacggccagctagggcttctttaggagacactgtttgtgttcaagtttgaatgataaaatcagcaaagcacagagctgggattgagagggtggaatattccaagatagggaaagatgatgagcttggtgtacactgtacagtaaatatagcagtcctgagactgctagcctgatgaacacctacttgcaaggttggtccctggttcacatctgaaaattgggatttcagtaatgtttccaccactagagagtggcttaattaattgataagctttaactaattgataaagttggtttaccatacctgaagtgtttataaacacaatgggacttatgctgaacacctgcttttcttggagagtctggaatgttggtgtgtgttaggggaagagtgcctatgtgataagccccaaataaaaactctggatactgaatctctaacaagcttccctggtagacaacatgtgtcacaattcaatgctaaaggaattaagcatgtcctgtacgactgcgctgggagagaggactcatagaagctggtttcttgtttcctctggacttgaactcatgtgccttttcactttgatcatctcctttggtatcttttcattataatacactgtagctgtgaatatgaccatatgctgagtcctgtaagtctttctagtgagtcattgaatctgagaatggctgtggggatccctaacacatcgtgcatacttacttcgtgtaattcatgtcatatatttgaagaaaggggttagtatgaacaaaagagttgggtttagtgctaaagacagacaaaaacaagggatgtgttttgcaggaaagaccagcttaagagaatcaacaccaataaggctgcatggtaataaaacctttggcaggtttcattcaactgctttgactcttttttggtccttttatggttttctcatcataccattctttctaagtaactccaagactttaggcatttaagttattcctggatattggcctaagcctttatcttcttaaaatggttcttccacgtttacaaccattacaattcaccaaacataaattaactgtctttgagactcctcaagattacattactccatcattcaatgaatagttattgagtacagatattttattgcaaccctaagtactaaggtagccattgctgattcaaagatgactaagacaaatccatctctattctcaaggaacttgctcaagggaagaaaagtgccaaagaaaaacaggcaaaagggctttgttcggatggcagttttgcaattgcatataagttttcagggccttctggccatccaaagccacatgtcctatgccacagccatgctcccaacaggtgaacatagaaaactgtaggtgagtcagcatatggaaaatgcaggggattcctgaaatagtactgagtcattaatcactgatatcctggctcagttcacgaagcaactgggagtaaataagcaaagaaagtgaactaatgcttagaagatggaaatacccctggggacatttgttgagtcagtataagaacgtggaaaacttcaacagtcatagattcaaatggaatgaaataagaggagaagaacattccccaacagcttgatctctcatcaaaaattgctggcaagcaccactcttctgaattctctactttgggaattggaggaaggaagaaaagaaaggaataaaatgttgttctgatctcagcggattctaaatttatgtgatgtgacaacacatagtacacaaacacatagctagtgtttgatgtgtgatgttgaattgacttatacaaggcaaattataatacaaaggaaaaataacatagaagaaaacaacctggagaaactgatgggagggaagataggctttggaaggggtaaattaattaactcaaaataagatagtttaaaaaaacaaacaaactacaaatggggattcatatgtacgggttgtttcaaaatattgagtcttgccaaagttgccttgagagaaaagtgaaagtgacactagatattgatatgtttggtttagtggtacttcccactaaatttggagcttctcaaatattataaagtgaatttctgatagccagttgcttcactgatttccattgcaaaatcaaggatgtgtttttttctttttttaggaaacaaagatttcacttacatgtaaaagatatatttaagaacatagtaaacttctaaaagcacagcttaaagaaaaagaaccacccacaacaaaacacttttttcaaaatatcaacagtcatagaacacacacacacacacacacacacacacacacacatatgtatcatacaaatgttgaattggtttacagttgtttgtacatttcagctaaagacctaaatgtagaaaattgaccaagtcatttcatgaaactcagtgaccttcatgttcagcatggtactttcccattttttctactttcttcacttaagaacttattcctacatatctcttttagcacatgtacacatttcagcatccctgatgtgaagagagagggtcgaacaccccaaggactgtgaaactaacaatcattgactgcatcctcctattcagtattgtgctaagcactagacggtctgatgacatttaattcataaatgcagtgcacaatgggtgttcttattctcatgttacagtaaaggctgaaatgtccatactctcttttgctccaaacaacaggctctgagaaggctcatccaccgataatgccacatgcaaggctcgtcccatcagcatttgccagtccagtccagggcgggctgccaggcctgccattgtctagggctattggatctcagtgtttgggaggacgcttcatccagccacaccaaatgcatgactttgagggacaccacccctcttcaaaaactggaagcaactcagcaacctaaccagcaatttcacacaaaccaggtcagggagatgatagcttgtccatgggtttacttatgaaagctgctcagcaaatttattgtagctgggtagtaatgcaggtttggtgactcttcaatgccacatctgcccctaaaggagttccaggaattctgatggaaattcactgagttttacttctgtgcacattctgtcacccaggctggagtgcagtgatgaaatcaaagcttactgtagcctcaacttccgaggttcaagcaatcatcctggctcaaccttctgagtagttgggactataggtgcatgccactatgccaaaataattttttaatttttttgcagatatggggtctcactgtgttgcccagattggagtgcagtgccacgatcatagctcactgcagcactgacctccagggctcaagcaatccttttgcctcagcttctgagtagctgggactacagctgtgcaccaccatgccttctaacatttttaatattttttgtagaggtggggtctaattatgttgcccagattcatctcaaacttctgggtttaagcgatcctcctgcctcagcctccccaagggctgggattacagatttgaaccaccatacccagccctttacaggttctttagcttctcctgtggatgccagtccacagggacagaatgcagtactcaaagctgagaagacaagttttgcgcttgcacaggattccccgttaaagcaaataacaataatgtgaagtgaaatgctgtctttcaaaaagttatttgctcttcacagatttttttttcagtgaatccttcccatttcttttacataagacatttcccaagtctcatcacctttcttaggccacaggtaattcagaaagctatagatttaataattaataggattctaccagaccatttctttccttacattttcaatcaatcagtcattagctattgagcatctatgatatctttcaccctccttggaataaaagcattattttttaaaagttttcttggcttcactgacgcatgttcctatcctttctccatgaataacacttgtttgctcaagccagacacctgagggaatcctacctgcccactctccctatgtcccctccaatctgccatccagttctgccagctgttcccagttctctcactctctgggtctggccctcatgcagctagctcaaatcattgaaaggactccatgacggtccaccgtgaacaatgcctctagaacaggaaaatatgatcacatcttcccttgcttaggatttttcaagtttcttctgaccaaagaatgagctcacctttcttgcctgccggaggaggctatgcagtcatttattcagttcaacctgtttttattgagcacttactgtgtgccaggcattgatttaggtgctaaggaaatagcagtgaacagaatccctgttctggtagagcttccattctactgagaggagacagataataaacaaaataactcatgcatgtgtgtgtgtttgtatgacatgcacacacatgtatatgtacatttgtatacatacatgtatatttatacttatttttagaaggtgacttgtgtacaaggtgacaaagaaaaacaaagcagggcaggattctagggaatgctggaggaggggttcattttacatagggtagtcagggaagaaatcagtaagaaagtgacattctgacaaagatgtgagttagtccctgcttgtttgtgcaacatctttttttaccgcctctctgccttgcatattctgtttcacaatattgaactcttagctgtctcaaacctaccagtccttcagcctccaggcctctgcacgcatggttgattggccccaggttgcctgttctctgcaaaggtggactcttagttgtcttttttgtctctgcccctcttctcttcctgggattctctaggcaggctcaagaccctccctctgggctttgactttgcctggaacaaacctgctagagtgactatcaactcatatcatagttcttctctttccctctctaaatacctatatgcagacatagacatgtccatatgtaacatataacacatgttattcactgagtttttactggggtaagtatatttttaaaatacatgtgtatatgttctgtattctccattactttttgaaacaacctaataaggtagaattatccccatttcacaagtgagaaaattcacttacccaatccctttccactaatggggctgggcttgagctgaaagttatctgacaccacagccttggtctgcccacaatgcccatagctttctccccagagcctaagctcccttagagtacattctatagctttgagtttttgtgtcttgcacctagcacagtgttcagtacagagtaattgctccctaaatatttattgaacaaatacattttaatactattcattcattcattattaatgatgtgcaaaatttctatgtctagcttcctaagtgtgtctccataggcccaatctttcaatagcaataatagcaatattttcatagcacttaccatgtaccaggtactgttataagtacaaatatcaacttttttgatcctcacaacccaatgaggtaggtaccacttttttctccattttacagagggaaaaaccaaggcttcaagtagttagttcaatttttgaagctcacacagctagcaagtgacagaactggggtttgaactcaggtgtcttggctccagagagcctctgttccccaagactgcatgacactgccttcctcaacccttcagactcaggttccaggcccagtgaatgatgttcagtgatgactatgaactgttttctaccactaaaaagagacataatcaagaacatctactttgtattgcttagtagagaaaagcaacctcttaaatccagtactcttagtgactaagctaatattcagaggaaatttggcaacctccttctaacatactgaaggcaaagggtaataaaaacataaaaggaaaagtatccaaaaagaaagtagataactaggtgtttgagaaaaacaaaaataaagaagtttttgttgttgttgtttgttttttttagatcaagaaaatattgggaaactgctactgaaagaggattgatgttggcataaagggagagatcttctgtatctcaaaggaaatttgccttttaatccaaagtcaagaaagcccataaacttaccctagaatcaagaaggaatcaactaaattatatcagaattcttagatccgaagaaggtcattttcagtaagtggatacttgcaggcttaaatgaaatgtgaaaaattttgaaggaaaatgtgatcaggaagtcaaagtaagcttttgacactgcctgccactccccactccccacagacaccctcccctcgaaaagaaaaggaataattttttccactgcttcatgaaggggacaaagtcctttgcgacttctttgccttagaatactattaatcttttgttgttgtgttcctttagaatactattaatcttataaaactgtgcctctgaccacagggtggattccagcattaaactaccaatgctttacagagaatcgtgagaaacactcagggaagaggtaattctactcaagggtcatcctttttccttgccaattttttttttctttatcagcatttgaaagaaaaccagatattttctttcctgaaagttgatgacttcaggtggggaacaagcatctgtggcagatggactcttgaaacgcagtgaaatatcctgtcttcctataaatgtttatgggagcaggagaactgaagaagaaaaacacagcaaaatgttgcatgactcacagtccgaactgcttctaaataaagcatttctcagagtttcccatgaggtgatttgagtgatcaggcagcagggtccctgtgagtggagcaagcacatttttaaaatacaaaaaggtatatccaacagtcactcaggagaatcgttctgttgttttcgatgtttaagaaaatgtatgtctaagatgagagtatcagatcatgtatatcatgtcctgttccatatgtggccagagcgtcccagcagttcttggctcggccactttgcagatgatgatcagcaggacgtttcatattgactcacagactttcctctaatagagcatctccaagtgatgataattaagtttaattttagatcgtgtgtgctggacctgggaatgtttttaaagtggtagcaagctccattgactttggcagttgagttttgaaaggaaggtcttatgtcttagactacctccatactgttcagtccctttatactccagaaaattatgaatttggaatcaactggggagaaatccttcgtcagactactgtgcaaacggtagacactcctgcccttgactgtcagcctcgcagatggaaacgtggccacccttcttcatattcaaggctctctgactagaaagtcagaaagtggctacagcccttccagccaagctagaggagtggaaaagtaaagtctagagggcttgagcttgtcaggaaccacggttagaacaattcctagattctctatgcagcttaccagtgacggtcttctatgacctcataacagattggcaaaattacattaggtgactcaaccatttctgggtactggtattgagtagcggtataaagacgaaatgattgtatcagggaataattactacctagaacgtgttcaactctctatatgtgcagcagacatgtggtcaaatgagctgacttgttctgggtcatcagatttaaaaactacaggatacccacttaaatataaattttagataaacatgaatacatttttagcatacatgtactccatgtaatattttatcattcattgtttacctgaacattaaacaaaattagttgcttctccgaaatttcaatttaactggacatctgtattttaaatggcaagcttctaagatgcacgagcttttctgagctactattttatcaaaacacattctgaatgttttcctgcaagaactggggaatctagagaaaatgcatcaaaaataatttaacattagcaagaaaacggccactttggaagggcttgtctcagtcactgacacatactgtaaacctgtacccccggaaaaccagcaggagagaaaagtaaaagcaacatgatggttgagtggatcctattgtgacctaacacttccacccagacagaatccgagttccctgcccgtaattttgagcttcaggttccagtttcctctttttctttactaggtttcgctgcctcctgtagggggaaataagggaaaagagataacgaaagaaagaaagaaaaaaaaaagggccggcaatttcatgtacatttgttttggcattcgctgaattctagagatgaaaacaatctcctgcttttaattcagtccacgtgcaacaaagttgtacgttgggagatctggcttttaataagaacgattaacaagcgtttttgatcacaggaagttgagaagagtcgctgcttctaagaatacaataaacattgactagcagttagacggtccatctttctctatcagccgtttagcagcctctactttgatttggggcaaatgcgagatgggaccaggagagagctccccacacccccaccaccacgtgggcagtggttctgttccagagcgccttccttcctgtccagggaggcaggctgctgaggccgtttctgggcaagaggccattgtcgggatatttgctttagatagcttgcagctgggctgagtgggtgtttcattcagactcaacacaggcagctcccaccgtctctactgtttcaggctagtggaagctaggggccttttgatttataaagagctctctgtgcctccagttacattttaggaagcaaagccgtgataaatgaagctctggctgctgatctcctggatacacacacacacacacacacacacacacacacacacacacacacacggcctacacaccttttcccctgtagcacagaggctttcaccaccaggagatttaaccctggcctagggtagccacgtgggcatccgtgttcatccgacatcctcttacatcagagcttgccctgaatagggcaaaatcaaagtgtggagcttgttggttttttatgtggtatagatattcttatatttatcacatttccaatttgaggtcatcgaccaccatggaaggaactgtgctggcatttctgggcaaagcctaaagttgattcttcttttcctacagacaattgttttcatgtgtgctgggaatgaatgcattctgaggatgaggggtggggaattctacacgcagggaactcaggagtcttattttctttattttcttatcctgagctacaaatgactgcttaattgggagagactacaattacaagagttcactgagggaagcatgaaaacaaagtgaaccagaaaaatagaaacccagacttctcagttcctgtttatcctatttttaatctccacatctcagttgctctctttcttgcttcttttgccttgctggaattcatacacacacctggctttccatttgccttggggacagtgaggaggtggagcccaagagtgggagggccctgctgcctgccggtggggagagctggtgtccgctggaagaggcagacctacagaaagctcggccgtgtctaactcaaaggtgttggcagcacatgaatgatgacttctcctctcttaactgcctgggctaggagactttcgcatgtccggacaagtgggaagaaggaaggtcggggtggaggtgaccatgagattgtggacgaatgttcagactgaccaaggcctgaagaggtctgaacgcctgtgttcttcagccctcctccccctcctctctctgtgtctctgactctcttctctcccctcccctccctctgtctccttccttccttcctttctttccttccttcctccctcctcctccttccttccttccctctttccctttctccctccctccttccttccttccttcccctcccttcctccttccctcccttccttccttctgtccttctttccttccttccttccacacatgtttaggaaatgcctgccaccagcagtctccacattaggttccaactataccaaaggaatctgtgccttccaaaaccttcccagggacagaaaccactcacaagggatgcctctgccatttcaccatgcgggtgcccacaccaccacaacacacttcaatttgtgaaaacactttttcttccctatcagagtgaaatagtgcatacccttgtgtggctctgcaactgaaagagacaaaagggaatcacaccgggaaaatcacacattctggaataaagagggaaatgtagaaactgggatcttaaagcctcgggggagaggaccctggggcccgggctctctgggcagcacccaggcctggggaggagctgtttccagtcggtctccctgcagaccctgagtgctgaggggagggttggcctgtctccttggcccctgtgtgcccagcaccagcatttgtgctgggaacctcccaggcaccactctgtgttaaggacgtgccaggagagacctgggaggagacgaccccggggctgggtaggtgtccagctccttcctggttatcttccacccagcacagaggacatcctgtaactcagttgctcctcacagggtcacatttagcctcccacgggctctgccactcacagtgctcctgtcaggaagcggggtttgttccctgagatcgccagtccgggagtctctccaggacccctgcgggtgtccgggtgtggctttggctgccctgttccctgagcctggtgtatcatcatgtgagaactgttactagtttccatctcagggaaaggataaccatgcccctaacaccctggcaggaccagatctacctttctgtctaatatgaccccttcatctgagagctggaactttctggaaccttctagagccttgtacaggctctggagcctactgcggacgcagaactagtaatagatttgctcagttcctgcagctttagctgtggggcactcagaaattgctgtgctatgtgggcttaaataatttgaatagacatgaatatatttaataaaaacaatctgctttatcgaattatttccatttttgttctcatttatttcctttagccccagataatgttaaaataaactactgatgtataattaactttagatgttatagtatcttgagccaagctgatttcgacgacagtgaagaacattttgaagtagttttatgatttttcacagcacaacagatttttataagaagaaaaaaaagctttaaaaatgctggcagtgttgtttagctcctccaacacaagcacccaccacagtaaagcccacaaattcacagtgggctgaaaagtggtttctggaactcttttaaaccttggctaactttcgggggctcccaaaggacaagattacttcatgtcaaagcaaaaattctcctgactctgtaaacagcccacggttctgggaaatatgaaaaacgtagatcaaaaatgaagttgtgttgtgtttggagaggctttccgtgatcacgaaccctccgtcccgtgggatccacactactcccgggtttttgaggtcctcctcgtcctcggggtcactgtatccctctttaccttcttcctcagaacacccattgccaaatagaaaacaccaatgatgatactactaccagcccagaaggctgattaaatctgcatacccttctttggagcttaaaccgtgctgtgcattttcacggtaaatagttttgtgttttgtggcatatatacaaacttggcaagtaaagacaaaagtcaccaaagacctcatttcccactagttttgtaacaaaaagccaaattgatattctcttttctccttcctaccgcacaaacgatactcccttcatcttatagcataggtaagtgtcaacacccctctcaccaagaatattttgtggctcagcaaaaatcaagtgaacttaaaatatattctgatcccaccaggtaagaagaaaatgtttaacataacacagtattccaccagaataagctgagctggggtttttttccccgtcgtagaattcatgttgggaaggtgggtgtgagtgatgattcactcacaaagtgaggcatgtgataaagaaaagattgtatcctagaattttaaaccttatctaataaattatccagacaaaggggctcagggctttttggcaggatcctgtacttccattagaagcccaaaaagctcaaagaaaagaaactacagtgtattccattcgttcctttggcaactcggatcttcccttgttttaaaccaaacaaacattcgcaaggaaaaccagctgcttttacaatgaataaacccattacctcaactcctttactcaataccattacagaggtatttttacttgtcagattttctgtttcagagaagcttggatattttcagtatgctgtcaatacagacaaaacagagctggttttagcaacagcaccagatgtgtctgaggacatgggccttcctggacctccaattccaaggttgggtggtaagttacagctgctgtcaaaaatagtaacaacaggatttggcatcttgacacaatgctgcctggtaatggctaagctcacggcacagtagccagtggagaggaggctgcatgcacatggaagggagaattaggagaccctggagcgtagactcaacctgtgcgtccagagccagccctgttgtaatctccaccacagcaaagaaaaccagtgcatgttgcttcaagtacccactcatgtttgacccatagcagtcggtaacattaattgtgctgagggaggcaaatgaacactaaccaatctaaaacaagagcaaaagggattttaccaaagtatcagcattggagaaccttccccttcccaaatccagtttacccctcttttctggataattgggtatcatggatgctcagtgtgtcagagggccagcgtgctcctggaatcaattggagacttctgtgacccacaggtcagacaagtcaggtctatagggtctaacaagagagtttactcagtagagtaaagggagcaatctccactcaaaaatgaacaagtggggtttacagaagttagactgtcacagaaccagagttagaagcagttgcagagccaggacatcttaaatgatcagcagtagaagtgaaggttaaagttttaaaaattatctatacacctagccacgtatgattgctttctgcagccctgatcccattcaatctaggctccgtgtggtctaggctatgaaatgagtacagcattggactgtttctcggttgatcttagctcaaactcttgttaactgaatgaccccctgagcaggtttttaaaatgccttgaccttcacatttctcttttatagagtagggacaatctgtcccttagagtttgttaatgcatgtagtacacttagtgatgtaatatacttaccacaatgtcaaacatatagtcgacactcaatagataataggtatggttattataaagcagtcaaaatgagccttgtattcaatagttccctgtaagaaaagcatgaagtctaacatggcttataggtcttacctctcaccagctttatctagcaacattttcgcctctgaaatcaacactccagagatgttgtaaattgttcagtgccttgaaattcagcatttcttctaactcccaggccttggaacctgtgctgccttgccttggagcatgctatcaacacctcccactcatccttcacctatcagcttaagtgccttcctccacttcaatgctaagctgtgtctccctgccccattctctctagagtgcctatgctgttatactcacttgcccagtagtggccttctccatgtgactccatgaaaccaggagccatgttttgttcatgttgctattcctaaaccttagcagagttcttatcccacagtaggtattccactaatacttattcagtggataaataaattacaaaactatttagggaactcaaaattactgataattctcaatctaggtggctcaattcagaagggaatagaattcaataagatagaaatagaaagtgaatatacgattcagaaatgaataggatataatctggtctgctctaaaagaatggcttttgcagaaaaaaatggctagctgacccctaacagctgttcccttctcctttcatagtaatagaagtcttaatttttagctgtgtccatagtcacaaacaaacaaacaaacaaacaaacaaacaaaaaactacacttcctaacatcgttgcaggtgtgaccagattttggagaagttctgaccaatgaaatgcaggctgaatgctgcctctcttcaatccattctcttcaaaatccaggctataagtacctagtcaaagccataagcccccaccacttactaaatatgtgatgtgtagtagactggcacactatgttgaatgacagctagaatgcactctttttatatccttttcttctctctctctttgatgcctacagtaaatatgtaaaggctggagcgttgactgccaaactggatgttgaggaacggggttatatgttagtgctggcgaagggcagagctggatgaagcctggatccctgagtattttggaaaatataaccaccataccagccccttgctgcttaccctctgacttttcatttgctttaccaactattatttttatcctctgttacttgtagttcagtttcaaagaaacctcttaattaccaggaattgcattgtgaaaacaatgatgtatgtttgaaaaaaggacttaagagagtttcaaagttatttttatttcaagattttcacagtagtattttaatagcaataatgtattttattgatgttagctaaagattttttaatctcaaacataaatgaggaaattataaatatcatgaaagaccagacaaaaatcaatagcgttctagattctaatcacacagaatatttttcaacagtcactggtgagcagaagaaaataatatcaacggagcagccagtctctccagaaagcaactgtgttttccaaggcagagaacacaacgacctttcttcttgtgtttatggtggtatttctcaaccacaagcccatgataactgggaacgatgttcaaaatatttatcaatctgcacaatctggatgccatccaatcagaacagatgctggctatagaacaactagtatatccatcctggctcatggcaacatgatttcagcctagggataccaatagtagcatgtgtacggaaatcacgtttcttaaattatcaaccacattttgtctaatttatggcataacacctgatagaaatgcctgtatcatatgcaaaattagaggttcatagaagtagttcttgttttttgtgtgtgagtttcctaatgagttggtttagaaaagaatgagacccaaaggatcctgctggagagatttttggaaggtggatgactggctgtttagcatgtatttttcttaaccatcgtttgtgtttgagtgcttgtatgcatacatgtgtgtatatacatgtacaaacaaaacatacaaaagtagtgtgactgcaactaggagtacattgacactgtgcctgtggccagcaatactgtctcctttcattccaggaacaagaaacttcagagcccccaacatactagacttgcttctggcattcatgccacagggctcctggtgtctcaaatactatttttgatgtgcagctgttgagttgaaacatctgatagtttctcttctccagactgatttggtgcaagataccagtaaatgatcatttgtttcagttcttacaagagtcaaaagactaatattagataatggttcctcccacacatggccctttccctctgactttttgcctggaggatcccagaccctgagaaaccacgcaaagtcattctcagacaggcttgggctttagccaccagatctgtggggctccatctggcttataaagtctgtccaaatgggagaataggagcacccggtgtcactctcccacacccctgtcagtccatgctaagtccttgctacagttgtactcatttccttttgttttcttccctgtggatttggagattaattggccatgattcactcagacagtcatttgtgtacttgaaggccattagtaaaatcccctctcggttcagaagaaaagagggtgatcaaaatatttaacaactgctaagactgaagaactgtaaaggcaccagcattattgtccagtcagaatggactctggccgtagagactgagcaggttcttggaggctctttgtttagagacttggaggatgagggaagcaaccatttgccagttggtctgggacatatttccttctcttaatcatggacagatctgtcccagtgtgtttctgtggagaatccccagcctcagccttactccttatagtatattatcaaccttgcgaatgtgataattcacgattagaacacttttcaagactaataaccagattgccagtgtagccctatttgccacagccagatgactttcagccatatctggagaatgatgtaagacaattttttttttaatctctcaaatttttaacatgtacttatgagacagtatagtaacacaatgactatccatgatttaggataaactgaacgtgatcgaagtgagtagtgtgatatggtttgctaaaaagaccccgatataatcatagcttgttctaacagaagcgtgatgtcttgtgctactcaatggtcagttgacatctaccctatgggctcttgttctggccaccatacttgtggaggaagtggtgcagtagagcaggtgaatggtcccagtgatgcaccagagtgtgtgcccatggacaggtgaatggtcccagaaacatatcatatgagaacaggttgaaggttttttcactatgcatgtcataaaaggtgcctgcattttgcatagggccttatttgaagaggaaataggcttattctgtgttgtcccaaagggacaaaataggaccagtgagtggaaggtaaagagaggtagaactggggtcaacataagaaagtgtctatggaaggagaatgaactattatagtaatgtaagttcaaggtgagtgcaattcagtgtaagaaacaccatgaggcatctattgtgccctggttaccgtgtgaggtgttgttaacagaaagaagaatgtggtggcttcactctactatgaaatacagatgtgagaagaattcataagaaacatcacatgttcccgaagggatgcttttataagattccaaagacaggtagggaggaagtgattagttcaagaaagtgtttataaaagagtgagtgacagatctaggttttgaagaataaattcctgtttgatgaagacagacagacaagggatggacgagtcttccaggttgaggaatcaacatgtggacagtccagagaggtccttcaagcagtcttggaattggttatttcatttgggagcgcaggcttctagtcttctgggatagtctacatccataacaggagctagaatttcaatgtcctcattatttttgaagtatttgcttgcatgtcagtatttgtttggttttcctcattcaatgaatctgttcctccagtgagtctgtaagggaattatttagcaaaaggttttccaagtttaagaataggaaaatgtttaaatatgagtatatttaaattgttttttgtttcaatggatttttttttcaagttggtctcttttactttgcatagggaagaccttttactttgattagctttggtgactttgctgcaactttaaaaatatatccagcatcctaatccttggaggttcagattcttggaagataaactgcaactttgcaaatggctaatggtctggtgaaaaagaaggatggtaaatttatggtagtactagttttatttaaaatatatatatatatatatatataaaacctaaagaattcaacactcaactgggtatatcaaatctttaagattccctaaaatcaagtttaaaattatttttattgtatatccaagctttgggtttcctggtcaccttttcgttgagctataaccagagaatgaagatgagtaggacctcagaagcagagagaagcagacaagtgggtcaggccaggtagcagtgtcaggggcaaaactctacttccaccaacctcggcatgtaggaatgttgtggcagtttgtagaccagcccttcttctacctaccatgaacccaccaatcaccatagccagtaaggagggtcacctttgtgtctcctaaaatgtttgtcaccactggatttgaaaggcacacttgacagtcttgtgtcaagtaaaaactattaaacacttccaaatcataagctgatggcttccaaagagcaaataaatgtcctaaagtgatcactatttttaatacccagcttgacagaaatgtctgttgagcttactgccaggtgccacattatcacttaaccaaaaatgtctatataaaaataacttccccccattggaatggtggcctgtatacagagaaatctatttatgtttcagttcagtttcaaacatctttgaaaaacaagctgaatggatagaactgaagcaatgtgcgcacctctggaaagatgcggcagatgttacctcttgaattggtggaaataaaaatgacattcctctcatttaggttgtttggtgttatgctgactttttaatataatctgaagcagaagtgacttaatgtcaacgacactatttcatggttataaaacttttggtttgagaagttgttagcctatttttctgctttctggatgtggatggcccttagaacaatctccccttagaagggatgcattgagtgtggagaagtgccagccactggaacgggcacgatgcataggttgattcctttaagttccaaggcagcttgaggcaactacccagagcagctgaattacagggtcctgcaggtccatgtctctcttctaggtgtttacttcctcagccttggtaatgctcagtccctggttcccagtgtcctctaaacttgccctacagtggcactcatcctgtatttcgattacacctttctcttggggggccaggactgggtcatggccttaggcagccacagagaggtcagcctggactagggtgaaagcaaaaggattctcagaaatgggacttgagctcaccagcaagaatgtatagaatttcaagccaggacaatagtgtgaaaaggctaggattaaggggtgggggacaaatgatggtgccttttcctcaagaaaaaaggcatagaattgaaggaggtaattatttcctcctaatgtgtctcatttttctgctaggcttctaatatcacacacagaaagttggaacatttgaagtttcctttctcccaaaataaaaagctgattttattcatcgtaataaatctatttacagctcattcataggtattggtcacttaattgaaaacactagtatgcattaaatattgttatatagccaaataatttttaattgtctcagctaccaacttgaaaaatatttcattttctataatctgagttaatttaaattgcttttgtgcttcgattgatacaagtttaactttttttctcattaagaaacattttactgaagtcaccttttgaagaatgtttccttttctgaggtactaaatctgttggcacttgacactacagttagtagcaaacttttttttttttagatggatttttgctcttgtcacccaggctggagtgcaatggtgaaatctcggctcactgcaacctccgcctcccaggttcaagccatttacctgcctcagcgtcccgagtagctaggattacaggcgtgcaccaccacgccctgctaatttttatattttttagtagagatggagttccgccatctttcccaggctagtcttgaactcctgacctcaggtgatccacttgccttggcgtcccaaagcgctggaattacaggggtgagccaccatgcctggccagtagcaaattttgagagaaggaaattaaataaaagtgcattcattttcttttaagcaaaatctctaatgagctagtgtaggctacatgaaaagctgcttcttggcattcaaaatgtttagagaccaatgtccttacaccatggatgtgcagtcaaatgaaagcttcctagtattcaagtaagtgcctgcagttctaagccaagctcttgcacttactgctggaagaaaggcggatagaagaggctaatgttacaagctgttcttctcaaggctattaacctgtctccaccttcttccttggacacagagccttttgatgcaaagctgcaaggagctgtgcattcttaaataaacattttccagttcaaagagccagtcctatgcttcaatttaaagtgagattgaaagagttatttgctttcttgtccctttagcatagacaagcacagcaagagccctcatgggttcccttgttcaacagtaacttctttccaaagatgaattagccaggcatagagtttgactttctcaaagccactaatgtaaggtaatccttggaatgagacaggatgactccaccgactcaggaggagtaaaatattgtccttcttaagtgagcacattgaaatggcctacctatgaacacagagccctctaatagcaaatacagtaatgcatcagtaagcattatgggtctgcaagatagcagtgacttacacaataatagccctgcacactagagtgtccagagcaaacaatgccctgaggcacaagtgcaggtgggatgaggtatgccagggcagtaacctacttacctgggccaatgatggcaactgagagaaagaatgtgaggtcttctttcagagtcactgaaacctgtgactcaaactctctgacataccagaggagggtgcgaggtgctaaaacaggtcacaaggcttgaagtagctgatgcaaactgactcagggaagagaaatgtgttcaaaaacagcatggggtagattggaatgtcccagccctaatctaagagacatgtgtctttgtagggatgacagactctgcctcaacacattttgaattatccagagcactgatatttgcagacacactttggttctgtaataatgaataaaggcaaattggtcattcaagaggtatttgttgaatatctttcattttatagcattgttcagggacttgtgaacgccacaaacatgtgcaaggacatagtctcttctctcatgttacttaaaaggtctactctctattttcaaagataatcagtggatagatacatagatagatattggtaagaatattttcaaaaaattgcctagaattctagaacttgcctaaggtctcttggcatcaattgtcatagtcctctgcttttcaaggagacgctagacaaatttctatgtaccatagaaaaacttttctgtgggtagggaagagccatcaatcaagaactaaatgtataaaatagcaaaatagggttttgaatgctagcttcacccctgtgttattgtgggcaggtttcttaaccactagaggctcaggttgtgaggtttttatcctcagaataatatttttataatttccttctaagggttgggtgagggttccatttacgaatgactgacccattgtagacactctgtcaatgctagttcttttctttattcttacattttaacccactggattcacatacaatgagtttacttaaatcggagatctgacagtgccaactgtgaaattctgtgcaagatggttagacttctctggcaatatggtaccaaaggaatcctaaagccatcccccttcaaagtatacaaaaatactggataaaatgttgaatgctttctaagagcacggcttaaggaaatggtcagaaacaaagaagctgagcaggagcacaaatccagataggtgactggtaaatctggcagcagcctaaagctgtctggctactgttgtaaactagagctttggatttattttattggtgaaccgacaggttaggtgacttcacataaaactagggtcttcgaagatcagcacccttagggaaaggatgaaccaaaatatattttcccacaaatacaaatgtccagaaagtgtatccagtacaggtatcagttttgattctgggaaaaggggaaagaagtattctttgagaatttgttaccctccttcacacaggtttgtagtccaattcacagtatgcattgtggtctgaaaaacatcaagccaagatttcacattctggtgccagattggtggtggttcctggtaactggcagaagtaaatgcaaatcttctcaagagtaaggctccttcaattcaggtttcaaagaaaggccaaaaattcatgaattaaagaaaaatcatagaatacataagtgaacaaagtaccacgagtgagagtctgcagaaacaacacccagcagatcaaaaccagagcataacagatactgaaattattagataaacatatacaataaatgtatttaataggtttttaaaaagaagatgaaagggttgacttgaaaacatgagaaaggaaaaagagagtgtaaaaatgatgagtcagatttgaaaaagcaatatatttatcctctaggaataaatctataatatatacaatttgaaattcagtgcagatattaaagacagattagacgcaactggaagggaaatcatgaaatgcaagctaaccttatgaaatgatcctgaatgcagtacagagtgacaaaagaggaaacaataaaaggaaggttgaaaatgtacatacagtgaaaaggtataacacacattcagtcagacttgtggaaagtgatcattggaaagacacaataaagagaatagggaaagcaaaaatacggaagaggtgatggtggagaattctcttgagttgatgaaacctacgaatcctcagatttgggaacttcaatgaatcacaatgaatctagaaatctaccctagatttttcaaaacagctgaccaccaaagataaacatgaccatctgaaaagtagccagagagaaaagctatatagcctaaaaggagccacagttcagcaggcaattgatgccttcacaggggcagcaggagctaaaatgcagtgcaatcaagccatacaaaagaatgaaatcatgccctttgcaggggcatggattaagctggaagccatcatcctcagcaaactaacacaggaacagaaaaccaaacactgcatgttctcactcattaagtgggagttgaacaatgagaagacatggacacagggaggggaacaacacacactggggcctgttgggaggcagggtgggggcaaggggagggagagcattaggacaaatacctaatgcatgaggggcctaaagtctagatgacgggttgataggggcagcaaaccactatggcacatgtatacctatgtaacaaacctgcactttctgcacatgtatcccagaacttaaagtaaaataataaaaaaaaatgcagtacaatcacatcttcagagggctgagagaaagttgccatcaaactgcaaactgactcaaggaagagaaatgtgttcaaaaacagcatggggtagattggaatgtcccagctctaatctaagagacatgtgtttctgtagggatgacagactctgcctcaacacattttgaattatccagaacactgatatttgcagatacattttggttctgtaataatgaataaaggcaaattgttcattcaagaggtatttgttgaataactttcattttatagcattgtggaaatgtctttcagcaaaataaacatattttcacacaagcaacagcaagagaatctattaccagcaggtcctcactaatagaacttctttaggatgtatgttcaaaggaaaggaagatggccccagaatccagatacagataaaggattgatgagcaaagaaaacacgtggatctcacaaatataatgtgaagcaaaaatggcactgacagattattcgttcatcagagaaccacgtataaaaagttcaaatactcaaacatatcttgactgggggcacatacataggaggaaacctataaggaaaaccaggcaataaatacacgaatttcagatcatgttcacctgttgaaggagaaagcagagagtgtcactgcatttttatgttcttctggagcatactcatagatctaccatggaccaagaaccactgtgcctgtatgactggctataggacaagaacaattgcaatgaggtgcttgtcttcaaggagcttactacagtctagtgggagaggaaagccatgactctatagctcaggacatgctgatagcataaatgcacacaaatccacccatactttactttgatatccctttctggttgaccctcaacctgagtgccagactcccttcaatacccaaacataccatatgtatcagatgaatgaatgaatgagtagaggagtgcttattttatattctgtatatcttgcatataaatcataggcacacatattgtttggtgtatttgaaacatttaatagcataaaatatttaaataatctttcagaatccaccttgagagttgcggataataatatattttgaacagaaatttcaaaatgtgcctcagtctaatatgtatttgtccctgcaaaaagctgggaaggtaagaatggaagtggaaaaggataaaacatgtcaatttagagaagacttttccctatctggcatcccttgaaatcaacagttagataatagataaactacatggggaaattttgtaccatttgagggtgtaatctgccacattatttcatgagaaagtttggtcatgtggtctttggtcatgtggtcttttttttttctttccttctttgcagtgacctacaggaagctcaaagctgtgtgttcagctgctctggctttcttcatggtggggcttagcattgattccctctcctgatggctccctatggcactccaaggctgagacatatttgaggctggtatgtttgggtatggaagggagtctggcactcgggtggagggtaagcctgaaagggatattaaagtaaaggatgggtacagttatctgtatttaggctatcagcatgtcctgagctttactgccatggcttttccctcccactggactgtaagctccttgaagacaagggcctcattgcaattgttcttcatcctgtagctggtcatgcaggcacagtggtgcatggtgtgtggtagatctataaatacatatcaaatgaatgaatgacataccatggacagctctcttcctatcctattgctagagcacatgggctcgcaggcaggtgagtgaacacaaacatgtgtgcaccccacacacacacacacgtacaaactcacacatccatcatttacatgcagaagttacattatactttcatgccaccatctgagaattccaaagagaatatcaggtgaaatacgttaaattacttttgcacatgctacaggtcatgagagtatgagttcatgagaaaggagacactgaaactgaattagcaacagagagcagaggttgtgctgaagggaaagcaatgttaatgccaggaaggagtctggtgttgtacgtgggaaatttgggataaactgcatggattttacagccttccagggaggcagagtgctggagtaggttcagaaagcatttctgaaaacctctttcttctagtcaccctgcctaatttcctctgactctgtcctcccctggctgcatttcctgtttctggttagaactctgacctaagtttctttatttcggaactaagcagaattacttgtttcagtgaatacatttgtggaccacagcaatggggagaaaggagcctgagaaaagtgttcctccggcccttgaggtcaaagacctgtaggaagtggtatggcaatgaccttcagtgacagcaagcccgtgatgtgacttcagcaaagtgggatgggccattttcactcactgagcttgtcagatgaccttttcttgattcaccattacctggagagtttatccaactgctgggacacaggagatgtgaagaaatgggtatactggtttgaaggataaatttgccttctagctgaacagaaatctgagagctgctgaatcacctgcaaaattatatcttgttctgtagtttgtttcctaagtttcctgggatttgattagtcaggaaaagaccacaccactagcaggggaagtccaggaacaagggagccaatgagttctgtgtcctacttaaatgaaccttgaaggtatccaggagaatccttccttctagctatggaaagatgggagatggggcaaagtgatgcccagtcatggccaagaaagatctgatgtttctacaaacagctctccctttcttgcatatctacctaaactggagacccttttatcttctgccagcctgcttcaaggcttttttttttttttttttttttttggtggaaataagttaggtgggtgggaaaggaagaaatgcaaagttgtgtctgcctgtgattaatcttctccagaacacacctgggtcttagaatcacagaggctttggatcggagggggctgagccgagcaaattgttcgggagtgggtagaaggataagaggtcaggtgggtagatggagagggcctcatggagggacttccccataaatgcagctcctgcatccacagtcctttcaaatgtgctgtgcttcactaagatcaaatgcatgggaactgggcagttttccaacttgtccttaattgtactcttgctagcatggctttattagtgggttctaagtgttgtgaatgccaagaaaatcggacatcatagaataaaggctatattttacaaccaaatattaagcatacctttcatgtattactgtttcccagtggactgcaacatttttacatctattattacatttatcctcactacctccgtatgaattatgcagggacttatgctcatttttcacataactaaactgcaaatcagagaggttaagtaatttgctccaggtcacacagctactaagtgaaagaatcaggacaagtattcagatcttctttttacactagcagtttggttctgtccatccactactgatggagatttaactatgatacggttacaagaaaacaaataatttcctcattgacaatttttcctgaagggctctcttcccaatacaattcccttctcaatacagttgaccagtatttaaatgagtcaatatccccgaaagttgaaaatatcagaaattctggattgttaaaaaaaaaatacgtcttctggataattctcgggaaatgctgtagaaagagatctgtttttgtcatactctctgggacagtcggttcaagtctctgctttctttagggccagtccatccattagagaagcaaatcaagttctagagagggtggtacattgtccaaacttatgaaagactctactcaaaggtggacatggaactgtgacccagaaaccgtgagtcctgtcaccccttcttgcgaatgtgatgtaggctgggtccttttggaagccaaatgcttccaagaactcgttggctttatttattaaagaagttctgggctgggcacagtggctcacgcctgtaatcccagcactttaggaaactaagggcgggggggggggcggatcacaaggtgagaagttcaagaccagcctgaccaacatggcaaaaccctgtctctactaaaaatacaaaaatcagccaggcatggtggtgtgcacctataatctcagctactcaggaggctgaggcaggagaatcacttgaacccgggaggtggaggttgcagtgaactgggattgagccactgcactccagcctgggagacagagcgagactctgtctctaaaaaaaaaaaaaaaaaaaaaaaaaaaagaaagaaaaaaaaggaaagttctggcctggggctcaggtgtgatgttttcacaaaagaaatacataatctacaagcccaggaagtcacattcgccctcctttatgtaccctccatgaaaatgagagcttgtctgattggaccagctcattgccatttaggggagtctgaaagacgagcacacctgggtggtgatggctatggaagtttatgcttctaaaattaaggatcagtaagtaaacgccctttaaatgcagtctatctgtgcgatggttctgaagtattataaaattctgatgcctcatttcatgtcagtcttgggaaaatgttctctcgtatattattgtttggtgtgcaaacaattaaatatattggaaggcaaaattaagcaatttccataaaaccttaaatatgcctatcttttgagccaggaattccttctttaagaatttataagcacagagaggtccactcaaggatgcttattttagtagcgtttataacagtcaacaattaatattcaagtaacaacttgtatgtcaatcagtgggcaatgggatggataaattgctgtccagttacgtagtagaatattttttggttaataaagaaaaagagatagaacttctagtactactatgaagttgtctctaccatacgtaaggcagaaagagcaaattacaggataacttgtatgttatatttttattttgtggaaaagagaaaaacgtgcatacacctttaagacttcacgtgcatggataatggactagaaggagatatatgaagttttgaacacttgtcagctctttggggagagaatgggaagaggacatgtttgtcttttttcctcttatacgcagtctagtatttttcagttgttttgtattgcgcaagtactactttcatcacttgaaatatcaatacatatttaaggaagaaatagccaacatgtatgttgggcttgctgtatgcgacgcagaatgctaaatatcttacatgcatgatctcacaggttactcacagtggctctgaggggcaggtggtagtatcagcccatcttacaaaagagaaaagtaagaatcagaaagactaaataacttgccccaggttacacagctagtgaaggcagaatggtctccggagaagaggactcatgcacttaacccctggctctgctgctcttcaaggcggtggcctgcacccagccatctatgaggggccattaaagattctgagtgtggggccagcagatgggatttgctccagtgaggaggggctggagctctttctaagtgacatggtattacactatgctgagtggattttgtccccagctgctgctctgggggtgattctttgcatgggcctgcaattcagcgatgagaaaactaagaaaaaggttcccctgagtctctctggactttcacttagggggaaaagtaatccgtacaaaataatgacttcctgaccccagttcctggagaaagccgagagacagcttctgctgaactcagaagtgctgttttcctacgtgaactggggtaaaggtactgaccagagagaagctgccctctgggcactggcatctcttctgggaacagggttttggcccttctgcaagtggccacagagatcgggttacagcagtgctgagctggagtaaagtccaggcctggggtcaagcaaggcctgagaactgttcgggaactgactcaccccaaagccctcagccgaagaggcaggtcccagagcccactctgctcacctctcagagtgaggggcttcggcaacaccagtcctgcccacttcagggaacagtgtaaaaacaagggaggcttgagaattcaaaagttctggtaaaactatgtatgggacctcttccttagccaggtgcataaccctgctgatctagactttttaaaaatatcccaaattccctctgcctggagtgctttcttcaatctaactatacctgggcatttcttccccatgggctaagattcaaaacaagtgtggcttcctccctgaaggtaaatccacatcccggcctagcaggggcccctctgctggctctgagagcattgtgtgtgacccccccaagtcctccttaaactccccacttcaaggatgttgtttcttttcacatctcactcttccacccaaccacgagctagagaaagacattgggactcctccccggcacagggtggcacggttgatagctgtgacctacctgaactgtagacagcccctctccgcctgaggaagaacaggggctaaccaccatgtctgggtttcatgtagggtttgtctttcaccggtgagggtaaagcttttgaaagagatcctagagagaatgaaaggaggggcctgggagtgagaggagaaataaaaggcttatagggagcacctccctatagtcacaaaggccatccttcctggcagattaattaaacaaaagataaccatccaggaagacaaacttaaaaaggagaatcctctaggcagattaatgacagaaaccaacgctttcaccctctgcccacttcctttggataggtgcttttgtgcagtacacaaaccgcacagccagatatggcagccctgagaataacattaacatatcacgtgccgagctccttttaagtgcaggtgctagatcaggtgttttgcatatgcgatttcattgaatctccatattgactctacgaaacagggactagtgtcctcattttaaagacaaactaaactgagacttaaagagggcattttctcaagggcacccagctaaaaagcagaagttagccttcgactccactgtgctggctctggacggtctgcttctaacctacactctgctaggtctcaggaaagcaaatgcaaacagatgtctgcacacatcctgcaaaaaaactgatggccaagaggaaacatatcccaggagaaggaattaatagacttcagaaaatgggagatttcagacaaagggcagatgtcttctggaacactgcacaaagcaaattgatggcaaatgccaacaggtgtctgttttaggagagggagcacctgccagtgtggggaacgtggtggctgaggagagggtgacgcagcagcacctgttctcttaatgtgacatggccaaaggcttcttcacagttggctgaaattacaagacaggaggatgggcagccctggcttcagaaaactggtctgtgaagcggataaagaagacagaacaaagaattctgatcaggcataaaacatttgtcggaggaagaagtgctgacgcccttaaatttgcaaaagaaacaagaaagaggccgggcgtggtggctcacacctgtaatcccagcactttaggaggatgaggggggcagatcacctaagatcaggagttcaagaccagcctggccaacatggagaaaccccatctctactaaaaacacaaaattagccaggcatggtggcatatgcctgtaatcgcagctactcgggaggctgaggcaggagaatcgcttgaacccaggaggcagaggttgtggtgagctgagatcacaccattgcactccagcctgggcaataagagagaaactccatctcaaaaaaaaaaaaagaaaagaaaaaggcataatatatagtatataaatatatattaaataaatactaagtatttatataagcatttagttacttaaaatatgtaaatatttagttactaaataaaaatatatatcttatatattatttcaatactaagtatttatataaatatttaattatttaaaaatatataagtagttgtttaaaatatgtatttatttaattactacttatgtaagtagtatttgttatatactatttatttatatttgatatttattactaaataataataatactaattactaagtaacatttattattaaacactaaatataaataaagagtatacaacaaatactatttatacaaataaatgataatttacataccatttacttatataaatatgttttctttgagaaattaggagatggttgtttagtggtgtgaagatgatatgtttactgtatacataatacattatttttttagaagcctgctagcagtacattgagtaagttatatgaaagtaattagcaaatgcaaaacttgatttaaatctaaggtacatttgggttcatgtatttcagaaatgtccattaagcacacccaatgttcaagggcctctggtaggacctggggccaccaagatgcattggacatcaagcctgccttcaggagcccatgccacagtgagaagtagataatagagtatcaagagcagacagtgggtgacattccagctttggcagtaggaggtgcgttttctgtagagaatttaaaaacaataacaaaactgacaaaaagccagtaattctaaacaatatctgtgataaaatgcttctccaaaaaagttagggcttggctcagtgcagctggctgtctgtttctgtgataaagttttattggaaccagtcactcttattcatttacatatttattatctatggcagctttctttcatgctacaacggcaaagttgagtagtcgtgacagaggccagatggccacagagaataaactatttactatctagtccttaacagaaaatgtttgctgacctctggtctgagttataaataactgctgcaattactgttgagtttcgataataatatctatgtcaacttcaattagcacatctttattagctgtcctttaataaacatttggttctacagggaagttaattccagaactccagttatatagtgttccctaaggactcagctgcatgtatttgttttgagagtctaagtttgtcactaattgaggtctattcttatctccaacccatataacattcttggatttaaagggcggattcaaaatagttgatgataacactctgattataaagtccaaaaaatcgagcttgaattacatatttttttgttctatgtgtccctttggatttttaatgtttaaaagttaaaacaatgaaactgaaaacttaaaataatgaaaccgagtgtaaactacaaggcgtgataattttgcttggtaggcgcaaatattagttcccacatggtgtaggtacagaatttaagtggtattttaaaaattgaaattaatgttgtagatcacaattattatatgagtactgctaaaagtaatttgtggccaggcatggtggctcacacctataatcccagcactttgggaggcagaggtgggtggatcacctgaggtcaggggtttgagaccagcctggccaacatggtgaaacctcgtctctactaaaaatataaaaactagctgggcaaggtggtgggcacctgtaatcccagctactcgggaggctgaggcaggagaattgcttgaacccaggagacaaaggttgcagtgagccaacaaggtgccactgcactccagccttggcgacagagtgagactctgtctcaaaaaaaaaaaaaaaagtaatttgtcacatagaagagggagtgtcaactgcattatacctccaaatgtaaatgatccttaaagaatgactgcatgaggaataagggccaagtgtcatgagaaatgtgccatgacagagtgtcacagaggtttcagaggaggacagtccttccacatggaggaagtcagtcagtgtgcttcctgttgggaggaaatgctcctgagaactgccgtgatgcccatgaggatgcgagtgtgtgtgtatgcttgtgcaccagccaggatgaacgtgcacaaagagcaacctcccttctccccatgcgaaacatatggagaacttggtgtgggttcttcaactccaagcctgtgcatgagactccagataattgtcgggattgcaccagggggaagggagggggaaaatcagaaggaaaggctttccaatctcccctgatcatttgctttcaatccagagagatatattaatggtatgaggatagcggccttctcagtctagactctgccacaagagaacatgcctccaggtcaatcaagaaggggccctgtgcagacaagtcaggctctgcactggaaggtcagaggcaggtgtggttgcctttaggacctgcaaatcttgcaagagacctctgacttggtccctgatgttccacccacatgctgtcagagagatgaaggcagcatgatgaaaggacgcagacttggttctatgtgggataaagccatgtctcaaagcctggcccatggtgtgtgtaatcagggccctgcttcaaaaagcagatgatgggccccaccctagatacattgaatgagatgctccagagaatgaggcctagcggtgtgcatatttaacaagctctctgggtgattcttgttcaccaggaagtttaaggactgagaagaaggctatagacagccagccagctccatctgcagctctgctgtccaggtgtgacctgtattcatctcagtgccaaatgagtcatcacagtctgcaagttttgtgctgaagttgctaagaaataccgaatttaagaaatatacaaatataagatattctatacatagtaaaatatataagaaattagatatataagaatagctccattttgaagactctactaagtacttacttaatatagtaactgatgaatctgtattgtgagacagattctacctccttctctctcattgtacaagtatcacacttgtagcccattttacaagtgagaaaacccaggcacagggttaagcatttgctcaagacgttaatagctattggatttaaatgtggaggcaggattcaaacatgggccagctgactctggggccatcacctttaagtacgaggcactgttgtctcccgacaagttaagagaaactgaactgttctgaatgcaaccttgagcctggaaaatatgcttgggcacatgatatagcattgttgacaaatctcaggaccactatgggaaagcaagggtcctaggctagaccgtgttgtttgaggtttatcacattgcttttgcatctctagacttccatttgcaaagctgtataacaatagtctctgtggcattttctaccttttgaaatctctgtcccaattgaagagcaaattaaaaatggggcaccaacaatataggttaagtcaggtatgaattcagcaaaaggttcccacagttcccaaagagaaatgctacattcacctgagaacttcataaaaatatagatttctggatgcaatctctcagggaacttcattcagggcaccaaaacgtctcttaggaattttgtcacttttggatgatcccggggttgagaacaataacctgcaacagtattaggatttgaaaaccttgcatccttgttttgatttttaaggtcaagtcctcacaagcttttcagtgagaaaattgtcctttttttcctctttctctgttcttacctccccccttccttctctccttcccttttccactctttcctcaaacatatattgaacacatagcaggtgctaggtcttatgctaagtttggaaaatacacctcctgcatgaatggaatgtatattgtgtgtgtgtgtgtatgtgtgtgtgtgtgtgtgtgtatttatgtgtgtacatgcacacaagagcatacaccctgagaaagcaaggaggctcacagagctatgtgtgctgccttttcttagcaactttaactctaaagagtcctggaaaacccagactattgactagattggagaacgatgataagctccttcttcaactactcttgccgggcaccctcatgactgccgttggcttctcggcccacgagtctaatcacttgtgttcattcctggcttgtgagtcacagaggagtcatccctgaccctgacccataagaagaatggtcatttatttaccctttgaaacgtgaccaggtggctcattaattttgcagcattaattctaaggggaaatgagattccaaccagcgtcattaatcttgtaaaaatacagccacgagaagagagcatcgataatcagaatgtaattttctgagttaggaagtggtcaggacattggtgtcagggatccggcacatctaaggttttcatggcattctcgccaatggcccaaccaggtcaaggcaatggttttaagcctggaagaaaaagaccacttcaaaggttgttgattcctaagatagagcttagacccttctctggcaataataagaatgacatctattgaatcattaatatctggttgttaatcattctaactaaatactttttttaaccaatacaggtctatttaagatattggtttataaagtattgctgctcagagtggctcagtgatggtcagtgagtgacctatttattcacattaatacactttgtttaactgtcaatctttccatagcctgtaatctcttaaaaatgatgatgatgattttcattaaaggaagctaagtctttttcaataattccatctacaagcaaaacctctcctaattagtttatatcctgtaaattcaatcccttattgcttttgtcttccactgaaactaaagtattatttaaccagatttatttttttgtccaatttatttatcctttcttattttcaatcattcagttgcagcctttttcaaaatacattcctattatctaaagctttggaggaaaatttgctgctgagaatacatacaaatatctgacttcggtgtcacctaccttttataagtaaaacaagcaaacaaaaaacaaagtaatgtggatatataccctatcattttataggcccaatttaatcatttttattgataatataggatgtggaaaaggtcttcagtagattatgttatacctgctcctaattattcaagacatgtaactagttatatcatctaccaccatggaaagaacgaaaaccagctaaagagggcataaaattaatgtatgacttccatgtcacaaaaagaagaaatgacattggtggccagaacgcaatgctgatgaatgaaactttggttttgtttcataattgcctgcattgacatgagggactgtgcatttagccctaataatcagataagaatcaagaggccactcacacgcaaagtgacttcaacagatctttattaaaaatcttttctcaactgcttggctgtatttcttaacacagagaaaagtttcttctaaaaatacctccttcttcttgctgcaaatcaattgctattattttctgtcaccaactggctaatacatagattgtctctattaaatccataggacattaaacttataatatggcttatgacatgcgagagattgtgtgtctccacagattgtaggcttcttctgaaaaatttatccagaacaattctaaggaaaaggtacatttccaacgtttttgtgtactgtggtgggaataacagcaacacatctatccattcttcagaaggttctagatagaaaagtcttcacatctttgtttatggatgtctcaacatttcccccgataccttcctgtgtccattaatacatactgataggcaagacaaaaataaatcagtgctatttatttttcacaggaaatctcatttccactaggcatctcaacgtgttttgacttttctcctttggttagagtgtcttcagaacatatgaaaactgtcaaatattaatgccagttatataattaatctcaccatcagcaaatttttgtaaaactttaaaatagttttttttatatttgctggaatcactgaaacagaataagtactaaatattggcaaattactctcccatgaggcttttagggtaagatgctcagtttgttatattggtgagaagtatcttgatgaatgtgtcatttaactcgtgtgtcaatggcaaattaattttgttatagaagaagaatcgacttatttttaatttaaaacatgagaaatgccagcagtcgaagcgactgttggtttaaccacatcttttctaaattggcaacacaaggcaatggtctaaatataagtactgcaattgtggttttggtttcagaaccattgcacagttgttagttaccatagttgagcagaggaaaaaaactgctcagggtagggaaaggaatttgcagactgccacggcaggttaatttagactaatttggaccccaatcatgagagtaacacatgtcctctggaattattttgccaagcttgtgctgggtaggttaacaagaaaagagttcactggtttttaaaataaaaagaacagagagatgggcaaaggtacttaaaaaaatctgatgcacaaaccatgttttctaatttaaaataccttagttggaagccaaatcttgaaatctagcttttggatttcaatgtctttcaatatgccaatggaagctgggtataacgattactacacagatttgaaattaagatttgtgttttgtttcccaccataattataccatcatgacatattatctcctcccgctttattttttattttacagccaccaagtgggctctgtatttccaaggcggttctgtagaccaaggtggcaatcacagtgttgttcacatttatttgttcaagcgacccagcaattccactccatatctctaccctgaagtagctctcacatgtgttcataagaaagaacaaacaagaatattcatggaaaaaagaaactgcacacattgttttacaatatctaaatttataaccccaggagaatggattataaatgggacccttgtatgtatgtatgtgtttgtgtgcatgagtagatacacaaaaaacaatggaatgcaattcaggagaaaaatatacctatcgacatgggtatatctcaagatacaaaatattacataaaaataatttgcagaaggctatataggcatagtcccatttatttgaagtttcataataagttgtgttttagaataagtatgtagcaaatgtataaggcaatgcataggaatgagaaacaccaaatcaagagagttgttctttccatgtggcaaggaggagaatgatattgagagccacaattgatcgaataatgtttgatttctaatactttattgagtagtaagcacaagaatctttattacacctttgaatgaatgaatgagtgagtgaatgaattcagttaatcaattaacagagtgctatggcttagatgtagtttatccttcacaaaactcatgtggaaatttaattgccaatgtaacagtgttggaaggtggtacctttaagaggtgattaggtcgaaaagatagactgtctttctcaagagactgggttagttttcttgagaatggactagttgcctgagaacaggttgctacaaagtgaggctgcctctcatgccctttgcatgctcccacttccccttcctcttctctgttatgttttgattcagcttgaggtcctcaccaaagccaagcagatgtcagtgctatgcttcttggacttctcagcctccagaatcatgagccaaataaacctatcttctttataaactacccagtgtcaagtgtttttgttttgttttgttttgttttgtttcttgagacagagtcttgctcttgttgcccaggctggagtgcaatggcacaatctctgttgaatgcaacctctgcctcccaggttcaagcaattctcctgcctcagcctctgacgggattacaggtgcccgtctccacacctggctaattgtttttctgtgtgtgtgtgtgtgtgtgttttttttttttttgtatttttagtagaggcagggttccaccatgttggccaggctggtctcaaactcctgacctcaggtgatctgcctgcctcgggctcccaaagtgttgggattacgggtgtgagccaccacacccagcccaggtgttctattataacaacaggaaacaaactctgacataaagtatactatataaactattctttatttttttatacatatgaaatatttaatgattattctttgcaaaaatctagaaaaatgattaggggtgaagaactagaaacagtttctttctagatactgcttggagcaatcagcccattttaatggtgagcagcagagtttaatcattattcagatgaaggtgtgcagttttgaaggcaaagggaaagatgcccctgggaaaagagagatgtaacattctataaagagtgatgatttaggtcaagggtccccaacccctgggccatggaccagaaccaggccatactgcaggaggtgagcaggggacaagcgagcattactgcctgaattctgccttctgtcagatcaatggcagcattcaattctcataggatcgcgaatcctattgtgaattgtgcatgtgagggatccaggttgtgcactccgtatgagaatctaatgcctctgaaactatctcccccaacccccctggtccacggaaaaattgtcttccacaaaactggtccctggtgccaaaaaggttggggaccactgaattaggtgatggtgtttctgactaggctggagagaatggcatcaacagagcagatggaagagtagacttctggtggagaatgacagcatttcctctgaggctgaaatgagattaaagacagaatcaaagagaccaaaattcttgcatgttcagaggaagttagctaaagaagttcatactgaatgtcgttgatttcagcaaatgaagaaggtgaatgacctgccaaagcttttcctggcccaaagtttcatgtttcttctccttctttgtgctctttcatggcactgtttcatgatcttctatttacttatctgtcctccacccaaccttctaacaataaccaataggtgataaactctttgcagggaggtgcagcacctgctttctttacccttacatcttcagcatttagctaccattcagagtaggaaggagatgatcaaaaaacagttgctaaacaaaagtcaagaggcagtattaagattgtatatttcaggagggagaaggcattatacaacttctgtagggagtgttttaggctctacagcctaaaggaatgaaagatttatggattaaaactgaagttgctccacacatggatcaggtctgcccatgtccaagactttcttcagtgactctccaaagtctaaaatcaagaaccgaaaagcagactttgagagtaatctggggttgtggttggctcagcaggcctaagagtaggtcataggggccttgagggtccccagtgagtgggagagcacagctgaaatgtttgaccaaggaatttcagctgggcagggcttaggagtatcaagtgggaaaacgaagtgaagcaggaagggggaagattttgaaggcctcattggagacaaagggcatgaacagcaggggtggaggggagctggtggactacctgtgaaagtagatgggtatcagttgagtcagaagggaagtagaaaagatgagagagtagagaccatcagaagaagtagagaagaggagcagagatgatggggcagatggtcgtaggaagtggccagagagcagggacaataagaaaggaaatggagcaaggtgcatagaccagtgcaaagcaaagagaaggcagactcctctttctgtctcccaccagtgatcttaactgaataggtagcaactcaggttaataaaagtagcaaagaatgagtactaagaatgagtaactgcatgcaattgaaaactacacaatgagaaccatggtgaagtggccaatcagatgtcttcaccactgaatgtggtcttcaccactgaatttcccaatccacaagcaatcgaattgtgctgactttttcccatgattgatatgatcaaatgaatttcaattttagcatagattcagctaatcttacataagcataaatcaaaaatataaagaatgataacaatggacatgcctgctgttcctataaatattattatgccacaatagatattcataataaataattagatcaatatgtaattgggagaaacttcttcagcttgtcattttgtaatacaaaaaggtgaattaacgaaacttccaagtttctttatcaaaggaaacatcattgacaagcagaggagttctcagaaagcatgtactcagttccctaaactgagacaaatggtttccatattaaaaatatatttaaaaaacacccaaacccaaacaatgtgaactaaaagaaatgcaagtaagaactactttgcaaaatcatgtatgacctcccctccctgctcaaatctgccagtgggatgtgacttttccagcctcctggctaaaatggagctcataaaaacatagctcatagatggcagaaatcatgtttgcagcatatctccaacagcccttaaatataacctgatttaaaaaataatctgaatgaagaataggaaaacaatattgaaatgtatgattcatattgaaatgcaagaagggcagggaggttctgaacaaaaaattaatccaagcatgtgtaaatttaatttggccaatgtaagatgacatcagttgttgagagatttccaaaacatggtcatacgcaatcaaagtgttctgtacctgagagaatatttagccatcctttcctccctatgtgatccctttccttttgcaaacctaaaggacataaattcttaaaatagagcaacctgcactatttcttaaaaaaatggtaagtattctccactacgaaataaaaagaaagaatcagagagaaatcgggatcttaaaatgctgcttcatttgtccacagagcatgcatcttctagcaatctgacagcaatgacttgcctaaaactgggcaatcatttcccagagagcagtatttacctaattaagagcttctccgtggtccccagttacttaattgtgtcattagcaggagttttgacatgaagaacaacttgtgtctagagcaccagcctggcctccgttagggaaacccagcggagcggctcccaggggggctggcagcagcctgctgcagtatgtacagcacaaaatagaataattggtccccagaggggctgtctcttcagctgccaatagggattgtttttttccttgtgaataaaaagccaagcctccatgactcttctactgaatattaacgtgtgcctctggtgctcagcggctcgtgggagggattaggtcctggtgattgttacagctgtcctctttgctgccctaccgttgatgacagcatgaaatcgacagtcctgatcaagggaataatgcggtcaagcttcctgatagtcaaatggataaaatgtgcagtgtaccatagaggtgtccaactgggtgggatcataggggttaaacttcagcctgggggccaaagggatgctctgtcctcctgcaatatgacatggcaaagggccggaattgactgagactgtcaggaggtcaggtggggggttcctggtggtccttcctttctctagcagaaaaagcaaaagaaaaagggtgagcacaagtggttataaatattttcccaggggaaaaaaaattaagtggttttagaaaggttttttttttttttttttttaaaggcttttaaaaattgagatataagtcatatgtaataaattcaccattataaaatgtacaatttagtggttctagcatatttacaaagttgtgcaaccatcaccactgtttaatttcagaatgctttcatcaccccaaaaccgtggacccattagcagtcacccattcccccctcccagccactggtaaccattcgtctactttttgactctatggatttgcttattctggatatttctagaaagatttttgattaaagagtttataagtatctaatatggattagagttcgcaagtattaaaaaagtgacagtaaaactgtggtgggggggtggaattaatctggagttcataactattatctggagttccagtttgaattaggatttcaaaaactgatcatagagcagaacaaagattgtcacgagtacattggcttacctcttttcttattctttcaatattaggattagtaaaattcatcatagaaacttaggctatgtttagtttgtggaaagcatttttttagactagcacagggaaaatatttggggaaaatattttcgtttgcattatgagtgtttattgtggagccttttaaattcaaaactgtgtatctttgtctttaaaaaaatctgtttcttgtaaagtgtcttaaaaaaagactataaacaaaaatattttaataaaattttactctctgaaatgatatttatatttaatgaatattaaatataaatttatttttatatttaaatgaaggattcaaatttatttagccaaggcaactgcttaaaaattatccatatatatgcataggtgatgagggcttttattgaatattttaggacaggaacttatttggtataaggacactgaaataatttttggatgtattattctccctctattttctcaaaattgaattataactattggttcaattttaccattggctttctcaatagcagccttaagatcttaactctagaacacctgccatctttatggcaagttaatgctaacgttttgttttaagaagagctccttggcacatctaacatcgaatagttagttcagaagaaagtgtttgctactaatgaaagccacttcttttatcgcaaggtttcacgttgggcagtattttagccttggttctaccaaaaagtaaagcttgagacaagggcttgcatatagtttattttgggaaaatatccccaaagaacaggagtgggagactggacagaggcaaatggaaggatggaacttccatccaaaggtacattattgagtgaaatccagaaagcacaagctagccagtgcagctcaggcaggaggctatgaggttacagatgggaagatggtggttgcaatgcacggctggagtgaaatgtaggtgtgaggggtgtctcataaacggtatcctaatttacacgcttggtggacacttacaggacatggtagatctatgtctgtatggaacttctcacaacaaatctttttcaatcaacacagctttagaaattctccaagttatcttgtctcataaagacagcagatgccaaagatcagcaaggagagttcagcctagcgagacagagatgcgggatacagaggctctcctgtggttcacacagaaagatgggaaccacacgggaccagaaatacggaccagggtcaagaactggtacctcaggatggagaaggcaagaaccaagtggaaccacgagagggatccaaggtgacctgaagctcttctctcggccagactgatagagagaagctcggcttctcagtgaggacacattggaacctgacccctgggcctttatgctcctcagatatgctgagggatatgcagacctcatcccagagttcaaattcagccattctcaaccaaacattttgttatttcataaagactggtattaaccaatgcttcacagtttattaagatagtacccgagtaaggtggactctgcctaattattagaaataatgttttcgatttcgtcaaatacagctggtggaagagtaaattgggatgacctttctggaggagggcaagtgacaataggaaccaaagccttaaaaatgtatatggccttggcccagcaattccacttgtaagaattgatactaaagtcaaaagctgatacatcacaaagatataacatatatataagaatggtcactgaaacattgttaataacattgagaaattgacaataagtgttaaacttatttgaggaatagttaaaagtttggtatagccagaaaatgaaatcctaggaagttataaaaaattatggcaaaaacatgtacacattgacatagaaacataaccataatattttaaagtaacagagtgagttaataaacgaatgagtccacttatataaaattacagatgtgcagagaagcgtctgcacagatatttaccacattttaaacagcactcatctctaagtaacaatgtgtcaggaaatttttttctctatatatttatatatcatttgggattttataagtcatactatcatttttactccctgaaaaaacagtaaagttatttccagtttgaggaatatcaattctagttcccagatcaggcaaaaacctgtgggtaacccccatcttaccaggtttagcctgggtgtgctacttgttacaacaacacaccatgattatctgactcagggtgtatttccaccccattgatacaaaaggttttggctgttttactttggaatgggggaagatgtgtcaaacctttacactcatgtgagtaacaaataatgtcccccaaatctgaggacactttccgtctttctacatattgtcagcaggctcatccccaatgtgccaatcatctaacccaaaaaacttgttcttggtttgctcaggggacgagtgagtcattaaaagactggcatttgggacatagaaaataagatcagtatcaggagaatgttcccctgtgaatctgtaaacttccctcttccttctccatctcctcccagtatttgctcggttcatttgaggatcattccttaccctatcatactttactgcaggtagggcttgcgttattagtggatgcattgctttcaaatattttatgcaatatattcaataatacatggtgagaatatgcaaactacagatcatatgctgataaagtgtactctgccagtctgttaattagcttaatagattaattagattgatctgctaaataacaaataagcttgtcagaaattcactgctgcaacactgatgactgccttactgttggcttagaagcacatgtaccttctgattcatcaaaaaattaaacgatgcccatcaaataattgcattgtattctaattttctgctaattggtaatttatacacggtagtgatggaaaaattttcattaataaaacattcctttctctcttgatgtcatatcagcaattcactacatgctttgtaagtagtctcttctcaagcccatatattttttccctccagttcgatagaatcatttactatattgagttctggaagggaagaagcaggaccgcatcttggaatccctgctactcagcatcttgcactctggaatcctctcttcatgatgtacatgtgactgacagaggttgctgtttgttcacaccgtccctcggacaaaactgtgtatccaataactgttgatagatgcttgtgggtgacaggcgttttagagaggaacatggatgactggctcacatagggcttcaccaatgggtggcctggcaggggaatcagctgcagatgcccttttctgacttgcacttgacaggggtcctcttccagcaggcaaacaacccaagcttggaccttctcaggaactgacaagtctggaccaacccaggaggctctgtctctggcacagcccctggggcgtaacttttgtttccttttgtcgcctcaagagcacagaggctttttgataactgctttagactgttttaattttgatgatttttcttttaaatatagaaacttttttataaaacaatttttccttaatatcttctgtccttatttacttcatttcctgtgattttttaggagcatgtaaaataaaggatgcataggtcctacctccagggatttggatgaggtgagtctgggctgggccccagacttcctcactaattaaaaagcagcctgagtgactctaataggccgctgagtttcacaaccactgctggtcgctcagtctcaaagagtgggaaaacacagtctttgtcttacgtaattttctggcacaaggcaagcctcctcatcagtcatttgtaattccaatatttattgagaacataaatatttatcagttactgcttggccctggaacagagataaaatactatgggctggaagcacacaggtagaaaaactttagagagtgtgccttaaatcaacgagtgtagttatatttcgtgaacagaacaagcctgtctcaaaatttctaagtgatcctttggaaatggcaacaagttgaacattttgaaaagggatgttgaaaaaggataacttatttgcatcttttcagaggaatggctaagaaacatgtttggcaatgaaaccatgttcctttctttcaaacaaaaatgttactagaactttgatatacaccagatctaagcagatggtaagaatacgctatccatagatcatatgctgatgaagtatattatatactagaactctgatatctactagacctatgtggtgttttatgaccacactgtatttaataagttccagtttattgttgcttggaggactcttcttccccccccacttgtttgaacatggacagatgtccagatgtcccttgggctctgctctgagtgtctcttctcactgcttccagatcagttgggagagttggagaatgggcatggctggcctcatcctttctttattcttcaggctctaatttctcatcagctgagtccaacagggaagacctgcccctggctgcccgtgccttctctgatgagtaggtaattctaattctggggttattaagaaaccattattgttatctaagcctccacagcctcttccaatctcgcttttgtccatcagtaaagaatgaagctacattttcacctccataggtctgacttctgttcttgcctctcactgaatgaggcagagtaaacaagcatactttctgaccttcctccagtcctaaacaataatatttacttatcacaaggtcactttgtgagagcggtacaggctgatatgatatcctgggatcagaattgtaactaaaccttggcagcgttgtggttcaaggcacagagtggaacttcatggtctttgccatttatcagcaatttgacctcagggaaccacttaacctcctcatacctcagttgcctgatctggaaaatggtaccttccttataggatgactgtgaagtttacacaaaatgatattagtacttgaggaaaatatttgcaacattttgacagtacctggcatgtaataagtagctcatgtgtgcttgctaatattattatttatttcattttatggtgacgttttttagttgcacaatataaaaaacaattcttgagtcactgcagagatagccatatttagataatttttttcatcatttaaaaaaaatcagccttgaaatgtcaagaccctttatcattaaatcaagatgaggggaaatacttcagtctgagtctgaggtcagctccaaaccaatgaatgtcacagaataaaatcataacaagtgtagcaaaattcagtaggtaacatatctgagtgttcccatttattacagagttttaagtgttcgaaatgcttttaaatggaaattcaattaaatatgaaaatcctaaagaatattcttggagcatggagatccggtgctcgcgactgcacctgattaaacatcttccctgccagcaaggcaggacttagaatgacttgctaaatggagcttttaattctaattggagttacaaaaaaagaaaagaaaaagaaaaaagctgattttgagaactacaaattgaagtttggaagattggagaagtcctctctgagttactctttctatttctggcaactctgctgactgcacaattccaggggctgcatttatgctgcaaggatgtaaacaatgccccaaggtagttgaacaaacagtcttcagaactttatccacttgcttcactggtgattctagagttgcccttggagactctgaccaatattattatctcctgtggtaagcagaataatacattgcccctcaaagatttccacatcctaatcctcagaacgtgtaaatatatgaatatattgccttgcatggcaaaagggactttgcataggtgataaagtgaagacccgtaagatgaggagaggatcctagattatccaggtgggcctagttgtatcttagggatacggtaggtaacatatctgagtgtttccatgtattacagagttctcccttaaaaagggagaacctttcccactgtgatgagaagaagatgtgcctgaaagaaaagtcagagaggcgagactttgctggctgaagatggagaagggggatcgtgagtcaaggaatgagggcagcttgtagaacctggaataggtaagttgccagatgtaaccctagagcctccaggaaggagcagtcctgttgacaccttggtttcagtccagtgagacttgtgttggacttctaattccagaatgaaaaataataaatttgagttgttttaagctaataatattgtgataattttttacaacagcaataaaaatctattacgtatagcaaatatacagaatgtctagcaagatagtaaccattctttagtgagttttctctaactgtaataataataataataataataataataataataaaaagctcacatctttattgacaaattggacctgactggaatgtatatcatcattcatccaaaaacataaaatatttgctgtctttttcaaaacctaccgggtgatagacactatgtgaaacctaagaatacagggatgaaaagaagtcccctcctgtgaagtcaactttctgtaggggacaagacaaattcctcttcctttcttctccttcatcttccttattcagtgggctaaatgaatatacctggcatttcttaggcattaatttaatcaattcttgcaatgattccaggaagtaggtaatattatcgctatccctgtcttagaaatgagaaaactgaaacacagatagatgaaaacttgccaaggtcatttgctaataaatggtggagtcagaatataatcccacgcagcctggctccagatcctgtggcactgactattacaacatacagcctcacaaacaaataatatcaatggcaagttgatcagtaaaacaatagagatgagagagagggcatcatgcacagggtgccatgcaaacatcaaagtgatagtctcctttgaatgggatggaaagtgcttgctgattcggcaacattttatcttagcttatattaataataatagctaacatttgcaatctccctacgtatgttacctctggttgcaaaacaatccaaaacttaatggcttgaaacaataagaactcattgatactcattagagtggaggatatgggatggatttcctggaagaggctaggctcaattgtgtacctgtggtccatttcaattcaggtgggcagctctgctaattgagcctggactccctcacatgtctgggggttggctggctatgggttgtgctgcctcagtcacactcacatgcactcatcctccagcatgctagcccaggcttctcacaaagactggcaggcttcccttaggaagcagccaactggccaggcatgacttctactgcaaactggccggacatgacttgtattgcaaactggccaggcattacttctactgcgttctactgggcaatgcaagacacagggaattcaataggaatcaaaggggaaagattcaaggaaaagtaggctctactttttgatggaaaaagacaagaagtcacaatgtaaagggtctgggacacgggaagcgcagagaatcgggaacattttagttatcaattgaccacaacatatattcgttcattttaacctcacagcaaacctctaatctagataacatcatcgtatagccatcccttggtatccgtggggtaattgcttccaggatccctctcagaaacccaaatctgtggatgctcacatctcttttaaaaaacagccctcagagagctgacggtactcacttgctagctgagtaaacagtggagctagaaccagcaccaggagccccttgatgccagagcctgtaagggcagcatcctgtgtgcacacagctcacaggcagagtggggccacagggattctccactgcctctgtctcacagaaacacagccacatgatatggagactcacgaggcttgggggtgaacagaagtcaaaatgtggttcctggcaacaagacctgaaggtgcagatcacagtgaactatgaaggatctgatgcagtccaagagagaaataagtgactgaaccaaggctgagatgattagaagagagaagaatcgagagacagttaagaggtagtatggacagggtgtggccactggctggatgtaaacggtaagagagaggggagatttgaggagcatgaaaagatggagataacgttaacaaaataggcaacttaggagaaaacaggcttgtggggattgcaggcaggtggaggcacctcattcatccctcatccaatgaagattttagtacccattatatgcagatactgttccaggcacttgagattcatcagggactaaatgaacagaaatatctgcctcacagagctttcattttacggaggagagaccagcaatgtacaataaacatgaagaagaagcaagttttatagcactaagaaggtaataattactctatgtgttagttacctcttggctgctgtaacaaattagagtatgatggttgacttcttataaatattaatcacctcctgttagctctgggcactcagtgaattattttatataaatctgataaccatcccagtcttctgatgtcaccctaaactctatattttaatactactgctaaattcacagtggatcagagctgtcttttgacagattaagttccaatatcaagtcctgggccctaggcaaataaaatatatttaactaatctgatgcagctgatagataccataaccagcaggaagacacatctccagttaattgaagcctcagctttagtattaggagccagagccatgcttaaggagtagccaaacctgttgggtgactatgtccagaaaaaacagttctgcatcagtcatgccaaaacagaaagtcattgtacctggtaaaaaattttcaacatttaatggaaactgcaaactgacttttcctagtcagtcaaatcacttggctatgtgagcatagaattcatagctgatttctctccagaggcataatcggcctcatattggcacacttccatggctaacatggccacttggaaattcttgccattaaaaactttcagacgaagttcaccttctccataatatataaggtggaggccacagttatgtacatgtatgagagtgtatttaaagattgtagtcccttcccatttcccacatcccagcttctctcaaagtgccaccaggcttcatggttcatggctgatagggtttgtctgtgtccccacccaaatctcatctttaattgtagctcccgtaattctcatgtgtagtgggagggacccagtgggaggtaattgaatcatgggggtggatctttcctgtgctgttctcgagatagtgaataagtctcacaagatctgatggttttataaaggggagtttccctgcacaagttctctcgtctgccaccatgtaaaatgtgcctttcaccttccatcacgattgtgaggcctccccagttacgtggaactgtaagttcattaaacctctttttctttataaattacccagtcttgggtatgtctttatcagcagcatgagaatggactaatacaatgtttgtgctgcctgcccccaaattcatctattgaaattctaaccttcaatgtgatggtattaagagatggggcatttgggagggcattagatcatgaggaagagacctcatgaatggaattagtgcccttataaaagctgcccaagaaagctcccttgccccctttctacccctttcaatgtggggttacgttgaaaagatgaggaaccaggccccacccaacatcaaatctgccagtgccttgaccatgaacttcccagcctctagaactgtgagaaataatcttgtgttgtttctaagctacccagaattcttttacagcaggctgatcagaccaagactgcccacttctgaattaacgggaaaaggttcactttctaagatgcaaattaggctttcaccaaagaatggcctttgttctacctgctggggccttatcttaggcagtggttctcaatcttgctgcttcttaaactcctctgggagcaactgtagaacatcaaagcctccaccttcctctggccagttgagtctgacacataggggttggaggagagggcaggattgaactctccatgtgattctgaagcatgagagggctgagaactactgacataaagcatatggagctcttgttttggtcaacatttgcccatggcttaaaccatgatttgcctctgatccatgacttcccaagagtttactttagatatcttacatttaataaagactgggtaataatgatgataaattggtcatgatagaagccaccatttacaaccactgaacggggcattgtacattttcttgtttaatcctccagcagcctagcaaggcagctatttaccatcctcattctatggcttaagaacttagggtcagagaaaaaacttgctcaagaccatacagtcagtaagtaacagaactaagatgcaaatgcagattccaaagtcaacgcatcaatagaattgtaatacagggggtgagtgctgtggagctgcatagggtcaggaacatcagcctaatcctggctttccagaggaagcgaatcttagctgtaaccaggaggataagatgaagccaagctggaaaggtcagagaagggcactgagggagggagaggggcactagagaggaggcaatacaggaaggaaagagtgtcccaggttggaggaagaggatgtgcaaggcctggaggtgaaccagaatgggctggtgatccaggtgagaatgaacatgagatgtccccaactggctcaggtaggaatggcaaagtgtcgaaatgaacacgttaggggatctatggaaaagagagcacgttgagtgtacagaacctgaattcactggaatttaaacgcgaaaagtgcatgcagttggaacgatgacgtgagagctcattacaggaaatgggagaaaaagaaagccctgctgttaagaccatgagatgtgtttctctcctaattgtcaccatccattctagaagtggattggacattatctactgtgatccttgcattcacctgaagaatctaagccttggagagggtcagcgacttgttacaggtcctagtggctgcctaaatggtcctgacctgggcctgtaacacagggtgattgaccccagagcaggtctcttttccattttgtcccacgtggaggtaaatcatgagacagaatagaaatcattttgcttaatttaaataataaaggatagtgcagagacggcttagctgcatgctgctagcatggcccacctcccctctgacgtaggcagctcctacctacatcagtggtccctcacctgggtgtccagagcagccactgagcacgtgcacactcctgggcatgcatgtgtgagtggcttttgcaggaagaagattcagtgcattcttaagcgtattgtatttccatagctctcaaagggactctgactcccaaatatttttacaatagcaaagtgcttttattaaagatcctaaaaggcacaatttttttttcctaagcctacatattcattactgatgaatagttttatttaatagtatttctgcatctggctttgccaatgcacagctagtttatgtctacatacataaaatagtctgagaggcagaatttccaatcattgctattaccaatgacaatgactactgcttactaaacacaatatgccacataggatcccaagaccttttcctgtattattgtatttaatctcaaaagtagtctgtgaggtagatactgttattataattttcatgttacagagaaaaaaaaaccctcaaaaataaaaagattgagtcacttgtcctaggttggtggttctcaaagtgtgatccctccggcagcatcagcattactgaaaatgcaaattactgggcccacttcagacctagtgaatcagaaactctgtggttagaggccccaaatccttattttaataagtccctctggtgattttgatacctttagtcatccagtttaagaactacagtcctagggcatccggttagaaaatgatgcattttatttactgctaaatatagcatcattgcccaaatcacacagctggtaaatgacattgctgagattcaagtcagggaaccaattgctagtttaccctctctgatttaagcggtgtagacatagacagtctaactaggttattgaagccttaatccccattgggacttaattttatgactctcattgatcaagcaacccttggggtcaagaacctctgctcagctgtccctattggtttgtcttgcaccactgcattctcagtgtgggtgtccaaaccctggtgagctccatatctgagctgtatgaccttaggtaatttttactagctttaaggaaagccatttagcagattttaattccaaatccacctggtaaaaaaaaaataatcaataggtcagataatcttcataaaaaaattgactctttcttataagacaaacctgtaggagcatttcacaatggcagccagaacctcattttaaatgctgccatggtacaatggcacgatgttgaaagatgaagcttgtatttggtgtgagtgaggactctagattctgaagctaaccacattagctggaaagacttcgtgcataccagaaatgtagaaaatactgcatccactcacaaacaacaccctatgtcaccttaagccgtggcttaatctctttgatttgactttttccctccaaactcattttaaggtcttgaaaatacacaatgcagctgcaaagctacactttgggactaagaacaagtttgggaataacgacttgaaattggattcgatgatctcttttcattttataagtgttatgaatccactggcttcttgcatgagaaaggagaacactttcagcaaatttcaaccatctcacaaatcacttcatcacaatagcttaatattccgattgtggactttacacaagatgtgacatcaaacgcaggacaatcttgaaatggcaaatgcctggagggagctgccggccacggagtctgaattacctcataccttgaaattagcagggcctcctgatcagggagtgggagcaaaacattttttttcttttattagtaagtcccattaactctggttctagctttcggtactccctgcctttcgtaaggagtgtcaccctcacaatgacacaatgttctgcctgtttgcattactaaacacaggaggtgcaatggggaagcaggctgctcataaaaatgagttcagacgcttgctacagacgtgacaaataccaagctgatttttatgcagggaatcctgtctcattttatgtgaaaataaggtaataagacaaaaggagctataggactccaattttagcttttttaaaaaaaacaacatagccatactgatatcctatgaatcactacccctgcagtggagtcattttttacggggtgtgtgtgtgtgtgtgcgtgtgtgtgcttgtgtgtgtgtagggagagagagatccctctctacccattagtataaaagttggatttctcaacagcttgacaatactggaaacgtctcgtcagtggttactccatcatgataagtattattgtgtgatattttttttcttaacagaatgaaaacagatgtcatttgatattaatgcctaaccccaagtcaatggtaacaatttaagaagatacttgaagaaaagaaatgaaactgtaaatagaattgttataaagtaaaaacttcaggagtttatttcatcttttaagaaaaatcagttccatttctttctctctctagagaggtagacaaacacacacagaaattctttctcacttggaaagggtagcgccatttaactactgtagtcatgagatggtgagggtggtagccaggaatggccctaagtgatcagcaggatcagggagagaaaaaaagcaccctgtgagaatgctgaagggtttgggaagtgtttctaacatttcaccagtcgtttttacttagcagctttagattttagattaaaacagaggagagatgaggaaggcagacaccaagatggggaataacagggcaggagcaacagaaacaaacagacacattctcaaaacccatttgtttctgttactggggctattctcattcctttctctttataccccattgataccccgatgtcctcttcattttccccagttgtagaatttcagttggcctctgacgccatgagaagaaacgaactcagtccaggccaatgcaaacgttttcctacaactctctcccactttcccaaaccctcctcccccagcagtgtcttctaatggcttctgtactcttgatttaaatcgccctaaatcccatcctctcttctacttgatcctaatgactaatctgttctgccaagaagagatgacacttcttgtcagcccttgccttcctgtggtcaaaattaattcgttcacccaacattcattaagcacctaccatgaggtagacagtggcaggcaacgccatcacaatctctgcccttgagaaaccgccacaactacagtgctctatcattctatacgaatgcagacggcacaatcattctcttttgaacctagaatatatattttcaaaggttcagatctaaaaaattgtttaatgaattaaagtacctagcaaactctcctggtcaaaaatagccatttaatttaccaaactctatttaatgcaaggattttattcttgggaaaggaaactaattccttttctattgtggctttcagcctggtctgactatcagaattaggttttggatctaatcacaaaattaacttgatgatagcaaacacaaatcgtcaaatcagatttttctaccaaataaatgcaatggaaacaagatctctcctatctacggaaaccatgatctcatgctagaattttagggaaataaagcttgaaccctaatgactattcatatcaggaaatattatttcttgtttgttgaaatgtctacctgtaaggaacaaatctaagatacttgcctttaaaaagtttaaaaaataatttgaagaaaaaaaaaggaaaataggtcttgtgtcagtgttgagttagttcaggtaattatgtttctttctcctaaaataatcatattttgtaattaaaaaactcacaacagcctttcatcgtatttttatacattcccttctgtgttattgagaaacttgtataagctcacaaaatataagtatgctctgcttctcatgtattttttcctttggatggttttgatttgtttttattgttgctccattgagtaactttataacaccataacattttgtagaaaaggattcctagatgaatgaaacctttctgaaatcctaaaaatcttacctttgccaagctagccttactggcatgaagcctgctccacttcctggttctgaccaataattttctatgcgaacgtcatcatcaaagcttgcaggacaacttgtgtggagcatttccagatacccgtcctcccctctgttatttcagtcaacagctgctcagcctgttcttcccatcaccgttcatgattgcgttagacaaaaatccacctttaaataaactgtgaaaactgagaacggcaaagcaaccagtggcaactaagaggcactctgctgttatcaacctcagctcacagtcttgggcgcatgcccagcaggactaaattctctatacagcaagggagagtttcagctgacctgctgtgaatgccccaagtgagtcactgccgttaactccatcagtgccacttgctgtctacttggacatttctgaacagctgcttggctctaatgtcgacctctaactggaaatatggcctcgtctgactcagtttcagaagagaaaaagggggaggcagaagggaggagagaaaacacacatgcccactctcaatccagattgacaactttgtttttttctcattgattgtggtagaaataattgttgatgaggtggaaatactaaacccagtttgtcatagtttctctattttgtctcttaatatattcctcatgaagttggattgggatcttctactgaaattatacgctgctgtggaaattcacagtccttaagagctcaccccatttccatattttgtttttaacatatccactgaattttccaaacacaaaagtgaatatttcttttattctaaaaatgttgttcataatattgagaatccatttagaatcaatcaacatttttggagtacttgttagaacagacttctggggtagacattaaaaaggattctgagaaatatcagacatgcttcctggattcaagaatttataataaaatgaagagaaaaggccttgttcaaacagatggcccaggaacaagatgagacagtgtgcacagaagtgtcacatgcctgctacagctactagaatctgtgagagctcagagaaaggctctgggctggtggctttaaatccagaatgatggtaactgatactaacaactgaagtgaaattgacttcataaacatggacgatgtgtcatagctgggcatgcagcccaagtgtctaagttgaagactgaaaaatgctcacatggcctcagtatttcatttcagcaaaaatccgtgatttatatgtgtattgttgtatgcacaggcacatgtacacatgtttttaaactcttatattgccagagacactgaggaattgatcatgtacttattctcctgggatcatttactattgtgtggacagtgaacaagcaccaagccgggtttctggagtttaacccaaagaaagacaaatagatgaaatagcataaggcttcttccattttgaaggtatcttctacctgctgtttttatttcttgaaaggagatttcagaggagaataaagataggttaattcttagttttatgatgataataatataactatagattttctaacagcatttcagcatttgtaaagatttttcttgaacagtaaacagaggaatgttattccatgatcattggtgctttgagttaatttagctctctgcattatttactccacttgactgcagtttgaagttgaagagagcatggtctccggtgcttggataatgcttcctatggaatatgtgagtagacttagttactcttaaagtcatcaaatgagattggaccacaaatataatacaaaaaataatctcaaggttttaatcctgaaaagcttgcaaatattagaaaacaatggatccaaaggaaatgccttgatttggggccctaaaaccaactagtagttttcagcataattttccaattcatatctaaggctgcttgaataattaataaactatcatcggttttcccaagtcaccaaaatcacacttagttgtgagtgcgatgtaaccagattttggtataatcaagtctgccttagaccttatctacaggcttgatggaacaaaagggtttttctccaaatggagagacaagtcagaaagggaatcctctctgaagggaagtaagaattgcgtggggaatacataccatggtcgaaattacaagttgattcatgagcagtcttgctttaataccatggtgcggtgatgaacgcagaaacaggcagtgaaacaaaaatgataaataaggtaaacagattctatgggaaaatgaatgacgacgataattcattctatggaggtgagaggatgctgagaggaattcccaaagaaaacagttgagctggttctgagtatgcctttagcaggctgccttgggcaaaaagtgagagggaatttcaaccagtaagtgcaatatttattcaagaagtatttattgaaatgtctattatgtgccaggtagtattctgaataatggggatatcattttgaatactcgggatatcattttgaaaaaaaccaagttcctaattcatgatgcctatatccccacagggaaggcacagagtaaaatcaaattaatgaatgaaaaagtaagtaaatagataaatgaaaaataaatgaaatatacttctgtattatgatgtcaaatagagacaagagctaaaaagaaaaataatgtaaggcaagatgagtttatttccaattatgtggaagtgtaaaaatgcaggtgactttcatgaatcagcaagatctgattgtccttacagcacaatatgcttactgggagtgagggtgagaaaggggtgagaaaaatgacaaaaaaggaggcagaatatttgggtttcaagtcccatatgatcttttaagccctgttaagaagtttgggttttcttctgaagataagtcaggagccatggaaagattcttaggtaggggatatggtatggtctgtttttatgtagatcacttccatggcagtagagagaacaaattttgggtgatcaacttgggaggtaggggcctcagttaggaagctggttgcttgtggcctatcagttgagttgaaaggattattacacacaggctggcctgtatctggtaatctgagctttaactaggaggaatcctagcccaggtgggtcgctgtaaatggttaacccagttgtaattgatgtgcctactggccctgaattgaggggttgctcctatctccccacccgacttgcctggaatttctgcttctgataataccagaatagctcctgtcagacaaactgtatcacaggtaacaactgtgaactctgtacaaattattcaaaaccaatgactgaatactctggagagagaccaaaggcaggcaaagacagagaggcaatcaatgctcaggagaagaacataacaatgataagttttctgctttttacaggctttagccagagagcaggtccaagttagggctacactaggaaatgaaaacttggatcacaagcaacagtcttacaagcttgaagaaccagaaaaacaatttcaggagaccaaaccagacagaagatagccagagaatgatatccaaaatttcatgtataaattctgcccaaatctctgatgtaccttgaactgtgcatgcacagggtagactctaagcagtgatgcctaggctaaaagaacagaacgcagatttcagctgctgcccaccacaagaatgaaaaattttggatttcagttctaatcaagttaactgtctgcttaaaacaaaataatcaacaccctttgtgatttggttgaattttctgaattcagggtctccaaaatgtattactcgccatgtccaggattactagatatacaaagcaagtttactagatatacgaagaataaagaaaatataacacaaaaccaagagaaaagacttaataaaatccgatcctgaaataacccagatattagcagacaaggattttaaagcagatattttaaacatgatctaaaataagagaaatatgtatttcataaataaaaatgctaagtctcagtaaaaaaatagaaaccataaataataaccaaatgagaacctagaactgaaaaatacaacgcctgaaataagaaattaactggatgggcttaataactaggagatgacacaagaaaaagtcagtgaagtagaaaatagatcaatacagtcataaaatcttaaaaacagaaagaaaaaacagattggcttgtgaaaagatttcaaaaggaaaacagggaaaatttttttgaagtagcaatgcctaaaattctccacatttggtgaaaaacataaaggttggaaaattcaatcaaagaaaaccatactaagagccattatgattattgaaagtaaaccagatggctgggtgtggtggtccacacctgtaatcccagcactgtggaagactgaggcaggcagattgcttgagcctaggagttcaaggccagcctgggcaacatggcaaagccatgtctctaaaaaaattagccaagtgtggtggcgcatgcctgtagtcccagctactcaagaggctgtggcaggaggaccacttgagtctgggaggttgaggctgcagtgaccatgattgtggtatcacattccagcctgggtgacagagtgagaccctgtctcaaaaaagaaagaaagaaaaccagaaaacaaaaaattcttaaagcagccagaaacaatgtaacacatcatataataggtatagaataaaaacaatacaaacaattgctaacttcttatcagtaactatgaaagctagactacagtggatcaatgtcattaatgtgataaaagaaagcaaaactttcaagttatccttttatatccagtgaaaataaccttcaagaaagatggaaataatcttcaaggtaaaataaagaaatttgcaaataaatacaaactaagataatttattggcagtatgtccacactgcaatatacactaaaggaagtttttcagactgataggaatttgtactagatgcaaatggaatcttcaaaataaattcaactcatttacaccagaaatggtaaatatgtgggcaaaagactgcttaaattaaaaaaaaactttgtattatgatttatgaagcatgtagataatgacacatatgacaactagagcagaaaggatgacggaatcagtaaacagatttaattaattacgacatttgtatatcatacatgaagtggcacactattaattctaagtagactgtgaaaatgtaagaatgtttatagtagtccttagagcaataactaaaattataatgcaaagaagtatagctaaaaagcctttaaataaaatcagttttaaaaatctatacagttagccccaaataaagcaggactaaagctccaccttcctagtctctatatattccctgatgattttatttactacccttgattcaaccaccacctgtaagatgacctttttataggtcacattgacagagacgtccaacaggaattttatgactcataagcccccaaatctatctataacccacatctctctcctaagatccagataatatacctaacacagaggtaaaaatgggaggcccatggctagatatggccttttaaacaaaattagggtttttagaaaatcagatattttttatattgaaatgtatttttccaaaatctcttggaaaaaaagtgaagatctgaaatacaaatcctgaattcctgcaacagcaccattcgttgaagctaagtatgaccctactctttagtctgagaacttactgatcctataatctctatcactccttatgtatgacatctgttcactttactcagtgatgagtgctgataacaacttaagtgaatgaattctatgattacatctcctgttatgaacactacacaacttgtaatgtaatctgtgtatgcattagctttttatcaacccagtcatgctgacctgaactgagtttgaagtcaacaagatcccttttcataagggaagttcaatttatataggtctttccattttatagctggatgattttctgaatctcaatgcagacttacctagttatccctagtagatttcatttcactgttttcagctcttcatcatggacaactgagatattttggaatccccattcagtcacttaccgcagtgtctttccttcttgattctatgtcattcagacatctgacattatgcattctacattttccaatttaaatggaaccagtctttggtgacagagaaggtgatgcctaatcagtattatcttaaaataattcagcctaggaataagtcctctcagatgacattctgtcttcacctgaagccagatcagtgttcagagaacatgactttatgattgatatttctattaatgccttcttgttgaccctagtacttctgtcttttgacaaattttctaatgtcgggaacatgaagaacatgaattgatagtgtcacgaaaagaataataggcagaacatgagggaaaggtttgagatatgggttgggctctggttagtgttcagaattgggcggcctgcatcggactgtctgatccaaagtttcattgattcttgcccctgggaatgtgagaatctgggaacagtttgcaaatgttttcatacccctcccatcttcttcatcataaaggagctcattcatttagctttcccttctttttactggcaccttttgaaagaaaggcaagaattaatgtgcatttgggaaacaaaagttgccacgtacatatttagattgttaaactatattcagaaaaatgaatacttttggcatatatgcgtaaagatcttggatctatgcccttttacaatgggtagttacttgcttctcagctacacctctgattctggaatgaggaagaaagtcttcatagtttaagaaagtcttcatagtttaagagccaaggacagcagaaaacatggactgaatgccttgaatcagggaatatctcatgcagtagtgtgaaaagccaggcatcttttgccttcagttggtccaagaagctctgagagttaatgtatagcttccctgagttaggggtggtttctctggcctatatagaagatttttaaatgggctgctattgctccttccttctttacattcttaacttgggctgttgacattaacatgttgtaagagaaatcaacagaagccagtttagaggttttagaaattatgtctttgatgtctaagaaaagcatctcaaactatttaaaatattatattgtgtttttttattgagatataaaatctaccacagaaataagccactgaacccacaaaaggtgcgtcaatttctgtagagatgttttaggaagaatatgatcaaatgtaagacatgacaataaaacagcgtgtgcacaacacttctcatcttcaaagtattttacaagcattgccttgttaatgctcatggctcatcactgagatggcaggtgtgtgctatttatcccattccataggtgacaaacccaagaaaggtgaatgggtcacctgatggagtggtatcagatactgctgataccatgggcattggggttgacacagcattgagtgtccagatgtcccttctgtgaccaggaagattgtccagatgtcctcattgtgaccaggaagattgtccagatgtccttattgtgaccagggagagactgtcctgctttttgaaagcacccagtgccctagcttccctcttcagccttcttcttccactgttcatttctacttgggcttggaaatcccactcattcccagagctcaactattctccatgtgttggtactccaacatttaacttgctctagatctcaagtgcaagagctatatttccacctcttgattgtgttacttcctccgttctgtcagccttccccaaaagtcattttctccacaatttaactcattgtttctcgcagatcttgggatctatacctctgctaaaggtaccatcaaattccttgattcaaaatctgaggttatttgcagaatttctctcttcctcttctctcacagggatattgtctttgctctggccatgaccaagagtgtgatttcaggaaagtttcttaaccttcctgagcttctgttttctcttcagtttaataacaacaataacatgaggttactgtgagaattaaagcacagaagaacatctagcacatactactcaacaggtggtaactaattaccgctcaagtatcccaccctcaattttccttttctttactccagccagtagcctggttcagatcatctttccttctataacagacaatttttaatcacttgttgttatggactgactgctgtgtccccataaaattcctatgttggagctctctaactctcaatgtgactatttggagatgagtttttgtttttttttttttttttgagacagagtctcgctattccgcccaggccggactgcagtggcactatatcagctcactgcaagctctgcctcccgggttcatgccattctcctgcctcaacctcccgagtagctgggactacaggcgcccgccaccatgcccagctaatttttttttttttttgtatttttagtagagatggggttttaccatgttaaccaggatggtctcgatctcctgacctggtgatctgcctgcctcggcctcccaaagtactgggattacaggcatgagccaccgtgcccagttgggatgaggtttttaaggaagtaattaaggttaaaggaggtcataaggatgagcaataatccaatagcgtcattacaagaaaaggaagagatgccagagatgatctctctctgcatgcatgcactgaggaaaagccaagtgagcaccaatgagaaggcagccgtctgataaccaggaagagagcccccaccagatcctgcccatgctgccaccctgatcttggatttccagcctccaaaattgtgagaaacaaatgtctgctgtttaagccactttgtcagtggtatactgttatggcagcctgagaagactaagacacttctaaataggtgtctcttcctttataattgcctcttcaacagcactgtagtcagctatgcagtgtccattcctccattcttcctaactgaaacaacttttgcagtagcaaatgtctcattaaaaataaacaagccgagcatggtggctcactcctgtaatcccagcactttggcagggtgaggtgggtgagtcacctgaggtcaggagttcaagacaagcctggtcaacgtagtgaaaccacgtctctactaaaactacaaaaattagctgggcatggtggtgcgtgcctgtgatcccagctactcaggaggctgaggcgggagaattgcttgaacctgggaggcagtggttgcagtgagctgagatcgcgccactgcactccagcctgggagacacagtcagactctatctcaaacataaataaataaataaacacttccccacaattccttgcattctcatccagtctagccaatgattttaagcaggcatctgggggaaggcatgtctgttaaaactattgcttttctcataacaagtgtgatattccattaacatacgagtttgaactttgcccttcccccttcttgcctgaaactctgatgcgctgttgggaggtagagcagccctctcgaaacctgaggactgaagcatccactaagtgaacaaggtggactcaagtccttgatattttctctgactgttgtgcccatcctagaatgccaaccttgacttcttgtttcatttgaaaaataaactatttggctttagtggtgttctgttggatgcagatattacaatcttaactgggagagcttccaaactgttctccatgttaccaccagaaaaaaaaaaaaaaaggcaagtgacatctccattaggtcatgctcctacccaaacgcttccactggcatctcattgtatatgaaataaagtccaaaccctgaagacaacatgagaattacttgccatcagcctctctcctttcctgccttgcctcctccaccccagcttccattctctgctataccatctttgaaaaaccacctgttcaccccagacacacccagcacctcctcaccttcttgcctttgctctctgcctataaagcctccctacatccatctgccaagacatgacttgttttgcaagtgccagctcaaatgtagccttcccctgaggcagcagtgtttcttcttataaggaatctcttgcatcttggggcttccatggtactttgcttccagcaaaatcccagactctttcacattctgctgagagttagtatgaatgacattgccgactgttgaggcagcgtggttgtgagtcagagttcaggagcctccatgcccagcctggatcacccctaacagcatgaggggcttagtactaattcctcgaaggctctttctctctttttagaaactctgtaaattggggtaatgatggtacctactgcctaacaagcattgttgcaataattaaaagaaaatatgcgtgtaaagtgcttacaaagtgactgctacatagcaacttaattttttttatcttctttcctatctagataagaatttttttggtagcagttactgccttatctgtctctctatagccgctcaggctgtagcatgatgctgagtatatgggagccacacaataactatttactgggttaaaccagtcaatattttaaaattcccattcaaattctgttttgcacaatgatgcatggaattagacactaaaatattcaagctacacttaggtgtcattttttatttttattttttgagtggagttttgctctttttgcccaggctggagtgcaatggcgccatcttggctcactgcaacctccgcctcccgggttcaagtgattctcctgcctcagcctcctgagtagctgggattgcaggcactcaccaccacagctggctaattttgtatttttagtagacacagggtttcaccatgttggccgggctggtttcaaactccttacctcaggtgatctgcccaccttggcctcccaaagtgctgggattacaggcatgagccaccacgcccggcctatgtgtcttcaagatctttgaacttacatgaatttgtgaagttctcattagaactcctttatccttttctccatatgctctttttatctgttaatttatttattttttttgttaacccatgcattattttgtttgtttcttaaagcaaatctttgcaataggtacctaaagaagtaaaccactgtatagtcaatagagatttcaggtgctgagagatggacttgtcctaagggggttagaggcaacaggggtttatgccccatggtaaggattccctgtctactgttcttttcattaaacaaagtcccatggcaagaataacccctccaagcctacaagccccaggagatattcccaacaatgaaaacatgctcaaggcattttgggtgatgaggtacaatcaggaaattgacaatgctgggtcaatgcagtgagtcttagctatgggatcagatggacttgggttcgattcgcccaggggttggtacactgcctctgtgcaccgatatgtgaaatggggatcttgataatcatgtgatagattgtcttaaaggtcaaagtaagcaatatatgtgatgtacatcacattgcattgtggatgcttggtaaattttatttccccaccccttcacaagcttgataattagcacacgttcatccaaaagaaagagacagagatttcttataaaaaattgagtcacattattatggaggctggtaagtccaaaatctgcaaaatgggcccattggagattcaagaaaaccgattgcacagaggaagcctgaaggtcatctacaggaaaattccctgttgctcagggaggctggtctgtttcttttattcagaccttcaactgattggatgaggcccaccaaattacagagggcaatttgcctcacttaaagttcagcaatgtaaatgttaatctcatcccaagacaccttccatgttgacacataaaattaacacaaatactatcctaaaaatgcttggtgcttaatgaggccaagaaaataatttcaatttttttagtaagttgctattacttgtaaccaattacttcttcagaatatacatcaggtgatgcctttctgtagatggattagaaccaaaattgttgttcacattactactgtgggttctgataaggaataagcatcatgttacaaaatttgagatatttgtgactatctgtagagggttctagggaaaccatgagcctgcttgatgcctttgtgcaaattcttttttttggcaaatgctggcaagggcagtacaggctggattttttccttcagccatggtacatggacagctggtgacctcagaccattttgtatggcttgtgtattccaccacaccatgtatatgaactgtggccttagaataccttttagtctgaatcaggtcatgttctagtcaagttgcaacttagtgatgcatcatttatgtcaaaaaaatatgtcagctgtactgattcacaagccgagcataataaatgagcataataaacgaatgtaagtaaaatggaacctatccctgacgttgggcaggtctttgccctgtttttcaatgcatcctgccacctttctcaggaacccagtgtaccgtcttcaccaaaacaccaggacatctcattattccttgtgtcaaagcaaaatctcttacaggaaatttaagtaaattcatcattttattctcttatgagtgaaaggaaacaaaatgctttttttccacatcatgactacactgtaagttttaagatgtgaagtaaacagcaatttgtgcttgagcctagatgtagaacattttctccattggacatccttcagcctcttgacctttgaaataaatatcagagacagaacttccccaccctctcacaaccatggtcagggtgtgcatgtgaggaaaggggagagttctagcagcaagagccaaaccagtcctggagatcacacggtcagccctcactgtacccatgcaaaccaccaccagtagaaataatacaaccatacctacctctcacctgtacagcacttcaattttcaataagcttaactcacactgtcttccataaagttcttgaacacttatacacctatacaatcaaacaaagcaaaacatacccaagcatgaggtagtcatcattcacattttagaaatatgaggactgtggctaaaataaaaaggggattaaaagagaattttagaccaatatccctgatgaacattgaggcaaaaatcctcaataaaatactggcaaaccgaatccagcagcacatcaaaaagcttatccaccatgatcaagtgggcttcatccctgggatgcaaggctggttcaacatatgcaaatcaataaacgtaatccagcatataaacagaaccaaagaccaaaaccacatgattatctcaatagatgcagaaaaggcctttgacaaaattcaacagcccttcatgctaaaaactctcaataaattaggtgttgatgggacatatctcaaaataataagagctatttatgacaaacccacagccaatgtcatactgaatgggcaaaaactggaagcattccctttgaaaactggcacaagacagggatgccctctctcaccactcctattcaacatagtgttggaagctctggccagggcaatcaggcaggagaaagaaataaagggtattcaattaggaaaagaggaagtcaaattgtccctgtttgcagatgacatgattgtgtattcagaaaaccccattgtctcagcccaaaatctccttaagctgataagcaacttcagcaaagtctcaggatacaaaatcaatgtgcaaaaatcacaagcattcttatataccaataacagacaaacagagagccaaatcatgagtgaactcccattcacaactgcttcaaagagaataaaatacctaggaatccaacttacaagggatgtgaaggacctcttcaaggagaactacaaaccactgctcaatgaaataaaagaggatactaacaaatggaagaacattccatgctcatggataggaaaaatcaatatcgtgaaaatggccatactgcccaaggtaatttatagattcaatgccatccccatcaacctgccaatgactttcttcacagaattggaaagaaactactttaaagttcatacggaatgaaaaaagagcccacattgccaagtcaatcctaagccaaaagaacaaagctggaggcatcacgctatctgacttcaaactatactacaaggctacagtaaccaaaacagcatggtactggtaccaaaacagagatatagaccaatggaacagaacagagccctcagaaataataccacacatctacaaccaactgatctttgacaaacctgacaaaaacaagaaatggggaaaggatttcctatttaataaatggtgctgggaaaactggctagccatatgtagaaagctgaaactggattccttccttacaccttacacaaaaattaattcaagacggattaaagacttaaatgtcagacctaaaacctagaagaaaacctaggcaatgtcattcaggacataggcatgggcaaggacttcatgtctaaaacaccaaaagcaagggcaacaaaagccaaaattgacaaatgggatctaattaaactaaagagcttctgcacagcaaaagaaagtaccatcagagtgatcaagcaacctaccgaatgggaaaatgttttgcaatctactcatctgacaaagggctaatatccagaatctacaaagaactcaaacaaatttacaagaaaaaaaaaaaaaaccccatcaacaagtgggcgaaggatatgaacagatacttctcaaaagaagacatttatgcagccaacagacacatgtaaaaatgctcatcatcactggccatcagagaaatgcaaatcaaaaccacaatgagataccatctcacaccagttagaagggcgatcattaaaaagtcaggtaacaacaggtgtggagaggatgtggagaaacaggaacacttttacactgttggtgggactgtaaactagttaaaccattgtggaagacagtgtggcaattcctcaaggatctagaactagaaataccatttgacccagccatcccattacagggtatatacccaaaggattataaatcatgctgcttgctataaagacacatgcacatgtatgtttactgcagcactattcacaatagcaaagacttggaaccaacctaaatgtccagcaatgatagactggattaagaaaatgtggcacatatacaccatggaatactatgcagccataaaaaaggatgagttcatgtcctttgtagggacatggatgaagctggaaaccatcattctcagcaaactatcgcaaggacaaaaaaccaaacactgcatgttctcactcataggtaggaattgaacaatgagaacacctggacacaggaaggggaatatcacacacgggggcctgtcatggggtggggggaggggggatggatagcattaggagagatacctcatgtaagtgacgagttaatgggtgcagcacaccaacatggcacatgtatacatatgtaacaaacctgcacgttgtgcacatgtaccctagaacttaaagtataataaaaaataaataaataaaaatttttaaagaggaagatttagtaatttgcccacgatcacatcacaaatacgtggcagaactgggtttgaaaacagatcctcttccatcttgagcaatctttggtccagatttcacagcagccacaagaggagtggggtgggactgcaccctcttttcttattcacacctcctcctccattgaggctgcaacatagttcattttcgcctgaccacccccagatgcaatgggtttgcaggaaagaaacacatcattcaatcagctgccatttctcaaagccatctggaaaggctgtgctggattgcactgaggtgaaaagcaaagcagttctctccgattccttcatcctgcatgggtccaggcacttctgtgcctcctttcctttcacctaaaatccttcctggattcacaagaaatgtgtaatccacgatggtccctcgctttgtctcacacactaacatctacatatttctgtggcatctcatgtttatttagtctgatgataatttttcattctcttttttcttttgcttggttctgtttgcctgatgtttccatgccttgcctatatgacttatggtgaaactctccagacgtaattatttggtgtaaatataatggctgaaaattaatatttatagcatttaaggagtgttgtatttttgttgttaatgatgacgttgtttcaaaatttcaagactctctttggataattgatgtattcatatttaacatgcaataatattgcacaagtgtattggaaaaagcaagtgttgaaattgttggaccagctctttttcatttgacacctactctttaccctattgaacttcaccttctttgtctctgagcacttctaaactgcagaagacacttgcaactctaaattcacgttgactgttccactaaagcaacagaagtgatatcaagtagattcatatattttaaaggccaaagagtattggttcaaaaattgctcctttttaaaatatactccatatggccatgggtttctcaagtagaccacagtttgatttaagaacatttttccctcttgagaaaaacaaaaaaccacactaacatatctagaacatttttcctgccctctctttgcacaataccccacctagtattatgagggattgtaggcctaactaaatacccccaacttaccttaagtacacaccctccgaactccccaaaccagttaggccttattgaaagagttttgccattcaaacgccttcccagttgtcctgtcttagccacacccacaaaacaaatgcaactgctcactctagagccagccggtgggcaaatagagctcagcttccagcctctcccaggccaggcatacatttggcctgaagctgttttgctgttttgtacaaatggaagccactcaactgcttttacaccttattttaatgccttattatttcaaagggatctctgttcttattgacaataattactgttaactcccccatcaagttcaaaggtttctgtgattatgaaacttcttctaaagactagccgattaatccaacttgttattaaattagaactatattcttgacctgttttaatggaggttttattactgctttcctaataagcttaactatcaccttgaaatcacatcaatatttctctaatctttattatctctattaggagtccatgggctcactcgctattagataggcatttaatgtctactataatctggccctaaattatcaaattcatttcaactccctgattcccccacctccgcccacctggtcccccctcctcctcaatgcacttgcatcttcttgtccaaccaaatacagagctttatactttgatgtctgaacacacgatatgtacatatatcagcctctttcctttaccctgcaagcaatggcctctcccttcctttctctgtcctcttcctacccagctcctccagcctgccttgttcactctgctcttgctcactctgccaaggccataggatcttgaaaacgcctatagcctctcccacccatgtggcactagtacacagagtttagcactaatttaagacttggtgtttatctctagctcctaagttcacagctagaaaacaaacttcaaggaagtggagtttgctcctatgttattgtggtttcaaactttgacaaaggaaagaatccctagacctggaatctgaagagttggcaggcagtaaatagttctagcgatttatcagctgtatggtcctgcatttgccacttacccttctcttggcctcagtgtctcattcataaattggagaaaatgccttttccgactacctgactgcattgctgcaaggagcagacgtgttgctcaggcagaaaaccttggagttgctttggctctccactatcttctactctcaaatccaaatcatcagtgaattctgctggctcttccaccatagcctatcttggctgaaaccacttctcgccaccttcaatttaccccctggccctcaccctatcccttctcaattggattgttgaaataccctcctaactcatcttcctgcttctacccttgagtggtgctctctgcaatctctttcatgtgatgtttcaaagccagtgtcagaatatcactgctctgctcagaactctctagcaccctatggtctagctcgggataaagtgcaaagtcctgacagggtgcctctcagcccacctccttctgctctccctctcaaccaccactctagcgattgcctcctcttgcatctggaacatcagaagggccgagttctgacttacttttgcttggcctggcatgaacctccccgagtagctgctcgatttcctttcagcaccactctctgtgttttcagcccactttgacaggagactctctgaatggccccttgaaaagcaccttaacccacctatccccgaacatgctttcttcctcttcagagttcttatcaccaatgacataacatgtatttatgtgcttatgtctgtggtttctgtctgtctctgctagaacgttagcctcatgagagcagatgccttgtttggtttactgccatatccccagcatgagagttcctggaacatagtaggtgctcaataaatacctataaaataaatgaacaagcgaatgaatgaatataatggagtttatttgaaactctacagttttaatccactgttctctaccttggttgtccattaagatccactgaggaattttaaagaatactgatgttcagaacacaccctaaaccatttaaatcaaaatctattggactgaagcccaggtgttggtacttttaaaaaactccctagatgtttccaatgtataaccaaggttgagacctattgctctcgagcatataaaacagtatttgtttctaattggatttgcgttcccagctagcaccttgctagctaagtgccttgtacatttcaaatacttcttgattggttgtttttaaaaatgaccacttttaatgcatagaatagtttgtgcactgggaaaaaaaacctcaatactattttacttggttagatttagatcggtatcttatttggggaatggaaccacaagaattgagtagctattctctgcaaggtactctgccagttactaaagatacaaatcccatttaataccatgtaatgacgataatatttttcatatggtaaaccaatgtagtttttttattccttgcaaatcattttgccctgtggctccccacagattgaatcagaggcatttattgcttcaggggaaggcagatactgcctaaaacaaagacaactttgttcagctttgaggagcagactagatttgttaagctcagacgagacaacagtcttgaaagctaagcttgtggagagagaaaagaatttgataaatactcaaagcttccctttaatcataaatgagaaaacttgtgggagtgacgagtaagttgtcaaacttttttttatttcaggacacctttgcaatattaagaattattaaggccccagataacttttgttggtttacaggggttatatatttatcagtagttactatatttataaattaaaattgagacatgtaaaaatatttattaattcattcttataagatcaatgttaaatccattacatgttaacttaagggatacatttctgggaaataattacattgtccaaaacaatatgtaaggagtgactttttaaaaaaaatattttttggaaatctcttcaatgtctagtttgatagaaagttaaatttttatatctgcatctgcattcagtctgtttcaatctgctgttttggttgaagtacatgaagaaaatccagcttcacacacatatttattaatagttcaaaaatgcaaggtatattaatcgccatttcagattattgtggaattattctttgaaaaaaatcctacttcttaatgtttagttgccatatggaatttcaaactatagcaatgaattttcatactttgatatattaaacttaatttatccatctcatgctttgaatagatcttttactcatgtatgtttttgtaacattatgtattggccacttggaaactatcagttcactaagttatgtagatctttcaaatgttgacacatttcattactcaatattttaaaaaatcacatttgttaatatcactatccatgtcatcagaaatgtctgtaagcacttggaagtaagttcacaggggtggaaacaaatttctaaaattcttatttttgttgaaaattcaaattttatcattagcaacaaatgttctcagctgtttttcttgaagtgacaggcttgctttaatcattttcaagaaaatatctccataacacctacgtttgaataactatagtttgtacgtcagttatttttcaaataagagtggtgttttatgaaaaagaggctagttcagaatactcacaacttgcttctgcttcttcagacaaccactgtggtccagtatgtagcagaggtggtttatgcatacttcctgtctggttatataaaatattaaaaagatgtgtactcaagggatgagatttaatagcattaatttttttattgcttcatggaggacataatttaatgaaactgattttttttaactgtacatggatggcggaaaaaatgcagtgactactagttgtgtttaacagcactgtcttttttttttttttttttttgagacagagtctccctctgtcacctaggttgaagtgtagtggtgcaacctcagctcactgcaacatccgcctcccggattcaagtgattctcatgcctcagactcctgagtagctgggactacagacatgcaccatcacgcccggctaatttttgtatttttagtagagacggggtttcgccatgttggccaggctggtcttgaattcctgacccaagtgatctgcccgcctcggcctcccaaagtactgggattacaggcgtgagtcactgagcctggcctcataccactgtcttgattgttgctatggtgctcataattttacacaccaatatttttacaacatcaatgaagaatgtcgacacattttttaaaagcaaataatgtctttgtatttatcaaaatcattttgtgcctcatagacacccctgctagggtctcggggatgcccagcagttgacatgtcacactttaaagactcctgcactagactaatcatagaggatgtgatataaaggaagccccatttcttaaaggtttcaggaagaagggaagcttctggtcccttaagcatggaatgaaaagtggagaggatataactggcagggtggagacatgggcagaggcatggagtttgaaacaaccagaaagatttgagggcatggctgggtgcagtggatcatgccagtaatcccagcactttgggaggctgaagtgggaggattgcttgagcccaggagtttgagatcagctgggtaacatagtgagacacccatttctacgacaaataaaaataaaaattagcatggtgtcatggcatacacttgtagttccagctacttgggaggctaaggtgagacggttgcttgagcccaggagtttgagactgctgtgagctattatcatgccactgcactccaggctgggttgacttatcttttgtgtaaaaaaaataagaaaagatttgagaaaagttccccaaggaaggtttgtttctcacttcccagggtatagcccagaggaacattcacctcctgagaatagcctgatattcagtatggcatgggtcccacatggtgcttcccaagatgcagactgaaaatgaccggtacatgacaccatacttaatagtgaaagactgaattattttcttctaagattggaaacaaggaaaggacatctactctcaccactctgattcaacataatactaaaagttctaggcactgcaataaggcaaggaaaattaataaaatgtatgcaaattggaaaggaagaaataaaaactgtccctatttgccgataacataaatgtctgaatagaaaagcccaatgaatctatcaaataacaacaaaaatttcctagaagtgaattaaacaaagttgccagatacctaattaatagacaaaaatcacttgtatttatatctactaagaatggacatgtgaaaactgaacttaaaaacagtactatttataatcatgccagagaaatttaaatattttggttaaataaacttaacaaaacatgtataagatctatatgctaaaaattacaagatgctgataaaggaaatcaaacaatgcttaaattaatagagaggcataccatgctcatggattggaagagtcaacatagtaaatacatcagttctttccagcttggcctatagattagataaaacttctatcaaaatcccagcaagatttctgtaggcacagataagcttatttcaaactttatatggaaaggcactagccctagaatagcaaaaacaatcttgaccaaaaaatgaataaagtgcaaataattagtacttgctattaatagttattaattctatatagctgtaatatcaagacagtgaggaatagacagtggaacagaacagagagcctagaaataaacctacacaaatacgtgcaactgattttttttctcctagaaagtaaattccagttgtgataaagtatgcacaaaagaactaagaacacagtgaaatacaataattttaattctgaccatgagtgatttttaaaaattaagtacaagtccaggcatggtggctcaagcctgtaatcccagcactttgagaggctaaggcaggcagatcacgaggtcaggagatcaagaccatcctggctaacatggtgaaaccccatctctactaaaaatacaaaaaattagccaggcatggtggcaggcacctgtagtcccagctactcaggaggctgaggcaggagaatcacttgaacccgggaggtggtggttgcaatgagccaagattgtgccactgcactccagcctgggtgacagagcgaggctctgtctaaaacaacaacaacaacaacaacaacaacaacaacaatttaagtgtaactcacatacccccaaaattcaccctttaaagtatgcaattcagcagcttttattatattcataaacttttccattgctaccactacctaattccaggacacttccatcaccccaaaaagaaaccctgtatccattatcaatcacacttcatttcctcctcacccaactcgcaaccattaatacagttcctttccatagagtcaactatcctgggcatttcatataaatggaatcatacaataagtggctttttgtgtctggcttatttcacaggccagaatgaacccaggagacagcccctagacccaatgtggttctagcacctacaacttccaccttcaaaccaggatgatgtataaattctgtttatatttgttttgatgcccctggaaagaaatcccaaattgacttaactcaaatcctcaaaagactacccatttatgcaaaagtgactgagttaatctgaaagagtgttttaaaccagttaaaactaagatactcatactgaccagtttgacttttcttccccttttataggggaacacagaagctccaaaatgagatcagttatggaaaataaggaacattctaattttttttttttaggatctgagtcatagcatctaggttcccatcttctcagctcctaacaatcctagtttcaagatgaggaaactgaggctcagaaacattgagagactgcccaatgtcacatgtaaattcaagtctgtctgctttcaaatccattttttaagcaaagactgacttttgataataagattaatatcaaagctagatgcttttcataaactcttactaagaagggtcatatactgtaacatctcacccaaatcaagctctacaatttttgagaacttataaagcaaagcaaaacaaaacagaattttctaattttcaggaactcctttatataagctccccaaccttattactattcaaaatttaaaacattttttttttttaaaaaaggatagcagtaaaaaaattacaaccagtagtcaattagtatattacttacatgctgcttaatactgggtggtatttattgaacatcgactcggcgtctatccctaggctaagcaatttccatgcatcatctcattccagtttcatgaccaacttttgaggaaggctgagtagcagaacccaggacacaccctgagtcagtaacagagccaacttcaagcccctctggtctctggagcctacactctttttattgtttgtttgttttttgagatggagtcttgttctgtcgcccaggctggagtgcaatggtgcgacctcggctcactgcaacctccgtcccccaggttcaagagattctcctgcctcagcctcccgagtagctgggattacaggtgtgtgtcaccatgcccagctaatttttatttttagtagagatggggtttcactatgttgaacaggctggtcttgaactcctgacctcaggtgatccacccgcctcggcctcccaaagtgctgggattacaggcgtgagccatcatgcccggcctatttattcttaagttcctaaaaaggtagtacatgaaagagagaaagtgtgtgtgtctctatgtgtgtatacacatacaaacatgcaggtgcctgctgaagtttcctcaaagcactgacatattactttattttgaaaagataatttttgtgattaactgcccttggataaattttagcgatagaacttttaatatgtggattatgaaaaaaatttaagccttgtttcttttgagatttaaactatactacaaccaaatgtaagcgacacagtgcgttaaaggttgaattgtatgttcacaaaaaagataggtggaagtacaaaccccccagtaccttaaaatgtgattatatttggaaatagggtcttcacaaatgtaatctagttaagatgaggtgtttgaagtttaatcaaaatatgactgatgtccttataagaagaggaaaatgcaaaaatgccacgtgacggtagaggctgagagtggggtgaggcagctgcaagtcaaggaatgccagagattgacaacccctgccaggagctggaagaggaaaggaaggattctatccagaatttcagagggggcatgaccctgctgacaccttgatctagaaattctggtctctagaactgcaagagaataaatacatttttgttattttaagccactcagattgtggtattctgttatggcagacctaggaaactgacacccagggctttagacaggaaggggtgggtgctgtgggaagatgatcacgtcctagagaaaacgagaagaggaataacaatgacatggaaaagaggtgacgtgttctggaaaaagaggaagttttgatgtacctactttcttgttttgattttcttagaattcaaagtaagtatgcagaaaaagattcatgtgaattggatattgcagacataatcaaggaaagccagctacaagtcttgctgcacttaagtgtaaggtttaatcaaaatggatggtagatttcacaaaacagaaccaaccatttatcatagttactaaaacgaatatcacataatgtgtacgtgtgtgtgtgtgtgtgtgtgtgtgtgtgtgtgtgtgtgtgtaaaatttagtgcactcaatagcattgagcctcattaaaaaaagaacatgttggccgggtggcgtggctcacgcctgtaatctcagcactttgggaggccgaggtgggcagatcatttgaggccaggaatttgagaccagcctagccaacatggagaaaccctgtctctactaaaaaatacaaaaattagccgggcatgctggcatgaacctgtaatctcagctactcgggaggctgaggcacgagaatcacttgaacctcggaggaggaggttgcagggagccgggattgcaccactgcactccagcctgagtgacagagcagcctatattaaaaaaaaaaaagaaagaaagagaaagaaagaaagaaaaagaaagaaaagaaaagaacatgttttaggaaatatcttactgatttttttctacttcagatctcacatgttgacaatgttgcttccaattctggtgtcttaataaaacaacccttagagttctttacgtcagaaatgtatgatgatcatagaagaattagataattattactggatataccacaagaggaaacatgtattattctccatacagatttacatacactgatctataaagggtatggggcaggttccgaagtgagtcatcactttgtcccaggaaggaatgggagagacgccttatcagggtggctcatgggacactcggtgaaggcttttctggggcctctgctgcttttcccattttgtccttgaactggacaattggcctgcacccacagacctgcttcctgtcaggaatttgttaccaggccttgcctttgcttcctcccaagctcaaagactcttcagttattttaaccccggaaagactggagcaaactctgcctgtcctctctgaggagctggtgttgtttcaccagctatgacaatgcaggggtatttttgtattcccatttgtgggagatagtcttttttattttacttgtgataaaactgtcagcaaattctgccttcatttctctggttcggtgcactcccttgggaattaacctgatggcaagttgtagccatgccatcaaataactgacacaaaatacatttcttaaatgggcatgttaatacctcagaaacttgagtaaacgtccaatgtggccattttttaaagttgtcctcttttattttaggaatgaggaactcattcacactagcattgttagagggatgggtagtggtgagctacatccagagtgataaggaggtcccaggaaggtcccaggacactcccagaaggagcacagggaggtttgtcccagttccccttcagatgacacagattcatgctgccacgatggaatgaccacacttgtcctcctctgctttagcctcatttcctctctccctctgtccatgcacgtctgtaggtgagcacttccattccgacggatgcacatgccatcttaatggtgatgcttctctgccaagctcctggctaatgcatgcaattcctcctccacttggaacacagatgtctcaaagtcaaaatgtccaaagcagccttattgcttcttccccaacccccatctctatcccttcttgattttccacattttagaaaattgggcaatgggcgccctcgccaatccagccagaccatcaccacctgctggattcaccaacaggtgctgttgatgccatgtgaagactccagttcaaatctgtcacttcccctgccctgcctgggaccctgtccctgccccctcctctctctgaacccttagagtctgctatccatgctccaccctgcagacagagtggctgcttctccagctgtaagtgagctcgtttcactttcctgctcaaagccctccccgtggtttctcaaggcacttggagtaaaccctaaacttcttactacagcttccaaggccctgaatgaccctatcccggccaacttctctggctccgtgccaggccgcatctagctcattaatttggagccacgtttctcatctcagagctcattcccacctcagggtctttgccctgcagtgcccttggactgggctgctctccctgtgatcttcccaaggcaaactcctttgaatcccttaggtctcagcagaaacggcgcccccacaaagaaccgcatagaccagtctacctaaagcaggccattgctccacagtgtccccaattcagccttactatcgtatccttcagaaaacacaatgtatgagtatttttgtctattttatttttattgcagtataacataatacaataaggtgacttaattttaatgtggagcttgatgaattgtgacatatctaaacccgtgtaaccaccacccagatcaagaagtggaacatgactacaaacccagaagattgccctacatcctttccaagttggtcctcagagtgccttcttccctatttccagagataagcactattctgacttctctcaccattgattagttgtgcttgttcttgaactttatagaaatgtaatcacatagcaaatactctgttgtgtgtgtcttcttttactgagcagaatgctttgagattcatcatgtagttatgtgtaatttgtccttttttatgactgtataacattcagctctatgattataacttatttattcatccttttgctgatacttaaactgttttcaatttttagctattataaatgaaactgctaaagacatcctgcacgagccatttggtggacgtaagaatgcacctctggctcatgcctgtaatcccagcactttgggaggccgaggcaggcagatcacgaggtcaggagatcgagaccatcctagctaacacggtgaaacacctgtctctactaaaaatataaaaaaattagccgggcgtggtggcaggcggctgtagtcccagctactcgggaggctgaggcaggagaatggctcgggaacccaggaggaggagcttgccgtgagccgagattgcgccactgcactccagcctgggtgacagagcgaagactctgtctcaaaaaaaaaaaaaaaaaaaaaaaaaaaaaaatagaatgcacctctgttgttgggtatataccagacagggaattctgggtctgagggcagacatatgttttaacagattatagcattagtcttagttttaattttgatttgtgtcttccctagtggaattcatctctgtgaaggctagaacctgtttaccttgtctacctttataccctaacacccagtgcagtgtctagcacattttaagcactcagttaatatttgttgaaataataggtatatcattctgttcattccatttctttcttttcttttttgagatggagtttcactcttgttgcccagggtggagttcagtggcatgatctcgactcactgcaacctccacctcctgggttcgagtgattctcctgtgttagcctcccaagtagctgggattacaggcatgcaccaccacgcctggctaattttgtatttttagtagagacagggtttcaccatgttggtcagtctggtgttgtactcctgacctcagctgatccaccacctcggcctcccaaagtgctcattccatctgtgatcgttcatttcagttcgtgcctctccagcttgtcatatcctttcatggtacattttaagcatcagttttcgttgttaaatgccgtattctcttggtgctactgcaaattccagacagaacctgaggaatcagcccagccttttcagccagccccacactgttgtgagcagactcaacactggcccccttgggcttggggcccccccaggcctatcaagtgtgtctgaggagtagactggcatgcccaacccatgctcgcctctgtgcagcatctcataggattcaactgtggctggaattttaacattcatcctgactggcacatgtatgtacttggcacaatgcctgacataaaattatactcagcaaacaaactactatcatgtatttccattattaccaaaacttcaactacttctcctactgatatcatagtccataattggccttcaccaggttagacaatcagatattccttaaaaagccaaccgcagttcgggaacatcagtctctaatttctacatgtccaatgttgtttgggatctgtagattacaaaacacaaaagtcttaataaaaggaaactgttagccactttatgcagtaaacaagaatgcatcatctgaggtacatacattccaatttcttttaggaaaggggtagagtcatttatgttaaaactcaacatgttatatttaaatatccatctgtaatggacagactaaaagtggccctcctgacccccacctcctagtattcacaccctactgtgatctcctcttcagtgtgagcagcacctgtgaattgctgctaaataatagaatatggcaaaaagacagggtgtatgggattaggtgattatattacatacaactgcatcatctggctgggtgcggtggctcacacctgtaatccaagcactttggggggctgagatgtgtggatcacaaggtcaagagatcgagaccatcctggccaacatggtgaaaccccgtctgtattaaaaatacaaaaattagctgggtgcagtgacacacacctgtagtcccagctacccgggaggctgaggcaggagaatcacttgaacctgggaggcagaggttgtagtgagacgagactgcaccactgcactccagcctgggcagcagaatgagactctgtctcaaaaacaaacaaacaaacaaacaaaacaaaacaaaactgtatcatccatcttcctggagtctctctctcccttgctggctttgaggacgtgagtagctatgttggggaaccccacacagcaaggaattaggaacagcatctagggagtaagggcagtctccagcctgcaagggcctccagctgacacccccaacaaaataagccctttagtcctaaaaccacaaggaactaaattctgccaacaactacacgagcttggaaatgtatccttccccaatcaagcctcagatgagaccacagctctagccagcaccttcattgcagccttgtgagtccttgagactgtgaacccaactaaactgtgtccagacttctgacctacaaaaactgtagatgataaatgtgtgttgttttcagctactatgtttgtggtgatactgcttcaccacaatagatagctaatacatcattcatttttgtcattcatttagttagcatctattaagagcatacttgctcataagatagttctatctttattaagaaacctgtatgctgtttttcataatagctgtactaatttacattctcaccaacagtgcacaagggttcccttttctccacatcctctacaacacttgtttttttttttttttgtctttttgataatagccatcctaacagatgtgaggtgatatctcattgtagttttgatctgcatttttctgatgattagtgatattgagtagtttttcctatacctgttggtcatttgtgtgttttatttggagaaatgcctattaaggtattttgcccatttttaaataagattttttttttttttttgctattgagttgtttgagtttcttatatattctggatattcaccccttgtcatatgtatagtttgcaaatattttctcccattttgtaggttgtttctatactttgttgattgttttctttgctgtgcagaagctctttagtttgatccagtaatcctgttagtgggtatatatctgaagaaaataaaatctgtatgtcaaagagatatcttcactcccatgtttgttgcggcactattcataatagccaagatatggaattaacttcagtgttcaataacagacaaatggaaaaagaaaatgtgatgtatatatacaacggaatactattcagccataaaaaagaataaaatcctgtcattcacaacaacatggatgaatctgaatgaaattaagtgaaataagccagtgacagaaggacaaatattacatgttcccatttatagcagaatgttaaaaagttgatctcatagaagtagtgaatagaacagtggttcctggcagctgaagagggtgggaagaagaagagaaaggagagagataggtcagtggataaaaagtcacaattaggaaggaagaataagtgctgatgttctgttgcacagtagggtgaccatagtcaacaataaggtattacacatctcaaaatagctagaagagagaattttgtatgttcctaccacagagaaatggtaaatgtttgaggtgatggacacgctaattatcctgatttgatcattacacaaggtatacgtatatcaaaacatcacagtgtagcccacaaatatgcacaattaagcgtcaactaaaaataaaaataaaataaaaaaggaatgactaaaatataataataaccctaaaaagcatactgtaggccaagcacaatattggacaccagatataggacatcatttagttattattcaatcaaatgtgaccagcctgaaagccattccaattctatatgcagttgttttataaaccccaaaacaatgatacaaccacaatctgagataacacaacactggcactactgaccttacttagtgttttcccccattatttccctttaggcaagattaaatgctcatggcaaaacaaacttatttggtatttcacaatgaaattatcatattttaataaaattattgaattatcaaaatttctgcaagaaatttgaaaactgtcacattacagaagaacagggatagggaccaaccaagctggctagacatatacaactacagcaaactatgttgttgttcgtcagttttggggtcaaggtagcatgtaatcttccagagagctaggttggagatacgaaaaatatttttaatgatacaaactattccagatatgaatatgaaattagtatttctggcaatatgcgttgtatacggcggttaaatgattctgcatttctgtggctaaataattggagctgtcttggttttaagcaactgtggattttgtggttaaattacgttgtctagttttaacaactctgtgtgtatatatatgtgtttgtatatctgtaggtgatttttacacaagttataggtcattgtaactaagccacagaaacctatgatactaccctgtgtgtggaatgacctcacaagtcactccaatttctgtttttaatgttgtcctgcaaatcataaccattcatagggaatttgaaattgcttccaagtctcatcagcagagagtgaaagccttttaattttttagagatgtcttccatgatgacaattgtagagtagaattcccctcctccacagaaagaataaaatttaactcttctacatgaactctgatttttttaatgcattaataagaatatatattttctagaaaactgagaagtgcagttccgttatcctaaacattatttttccaaatccaaaactttttatatgattctacattactaatttatgttgtttttatgtcactttgttgtatgtttcccagttttgggtttcataaaagtatagtttcctctacaaataaaatcatacgaataagatttttgtgggtatgagaaaaggtaggtgttaaaactagcaagccagtgaacaggtgatgagattacggagtctataaccacagattgctattttcacattgagcctattataaccaaaagttgtttaacctataatcagttacttcttacttaaatagatgtactactgttctccaattaaaacatatgatgatatcatgttaattcaaaatctattcctgtttctatatttttatttctcttaatagggcttattaatttgtcgttcaagggatcagttacattggaattaatctcttcaataaatttaatttaatagcaagaattaatagcataaaacactgattctctttgactcagtagttcttccaggaatttatgatatgggattgagtgagaacatataaagacatatatacaaaagtgtccattgcagagtacttttattgttttataaagatagaaattgatagtataggatatgagcattttagaaaataagtagtggaacctctgtatgataggatattatacaattattagtgaaatttttgaaaattatgggatgacaaaatattttattgctaagaggagaaagtgaaatctgaaactcttattaaaataattactgaaggaagaaatatgaaaaggaaatacagtcccatgttaatagtgcttgtccattggaaaaatcatgggtaattaaaaatgatgggttcctagtcactttagctcagtcataaatttactgtgaagaattaggttctggccagtgtctagacccaggaaaagttaataagggcagtgaagcctttcctgagctacactcttctcagagattgttgtatgggtagtaggggaattttaaaggcaagtagtggctgtggagttaaagaagcttcttggagggctttagaaatactgggaaaagatacagggctcctttccatcttgcagtatggaaactctgcataaattttacttgtgcattcaaggaaagagttatctgaaggttggaaaacttggggcaagccagattccctaatgatagacacataccaaagtgtgttaatcattagagctgtccatccatgtttctagctctcctccattagggcacctagcaggatggtaaaccttgaagtcagggatggccatgtgacttgctttgagaagtaagatgtcacacttctggtcacaagcatgtttttttcctcctgtcaagatgacagatcttaatccagagtggaggctcgttcggcctggagcactaagtggtgcctctttctcacccaaggtggacatggagcccgagtgagaataaatgcctgaagtcagtgacattggggatttgtgttactgcagcctaacctcctgtatcctggctgatacattcactttttgagatagatgtattaagaaaaaattgtacagacagaaactaaaatatggcaagccaaatatcttatatgcattatttaacaaattcttcagaagaacatattgccaaaaaatccctttagaagttaaaaaatgttttataatgtaaatcattatggcctaataaatgtgtgtattgataaaatgttatagtatctcaacaaatgcaaattaacctttacaaatcttggaaaatcctttaactaaaggtaagttttaaaataatatgcctatcaaatgatggtaccatatttactgaaaggagaatctacttttacttccataaatatgtttaaaagaattagagcatcttgggaaaactgctgaatttagggctaaggcagtgaaagtacaaggtgtgtcaggagcattttgcagtggccaaaggtaaggaagtgttgaaataaataaagtaaaagggacatatcaaagggataaagaacaaacctgaaagcagttccaatggctgtttctaacacagttacagccaaaaaaaccacaaaattactaactataacctgaggaaccagataaatacccatgagttcatacatgcatacatgcacacatacatatacacacaaatggagaaaaaggaacaaatctttcttctacaagaattttgagtaatatgtgtaggtacttccccttccaggaggtcggcctcaattgccaccctcctcaaccttcagggtgggatagacttggtgactcattttccaagaatagagtatggaaaagtaaaagaaaatattagcaatttaataaatttttacagtgcagaaatctaacaaacactccttcgactgagcagttaagccatgcgtaaccacaatgcttaccactctaccaagtgatgtcatgtggatagcatgtctctcctaatacaatgtgaggagaagggcacttaacctctctgtcctattctttccaacatcccatgaccctatgaggaaagcaaacagaaaaaaatagagcaggggctcatcctacaggatacttggccaggactcttcaaggctctcaagatcattaaaaacaaggaaagaccaagaaattctcacaaactgtaggagaccaaagagatatgacaactaaatgcaatgtggtgccttggattagatcttggagcccagtgaggatgtaatgggaaagcgggtgaaatacaattagtatctgcagtttagccgacagtaatgcctcaaagttgttttcttagctgtgacaaatgtaccatcataatgcaagatgttgacaatggaggaatctgggtgaaaggtacaggagaactctctgaactatctttgaaacttttgcttacctataaaattattccaaattaaaaagttaatttttataaaggatctgttaaatgtgatcatttgacttccatatttattgtaccatcatattcaccagatgttactcatattatttatttgtgtaaccacttggtcaccaaaaaggtagcatttgagctttgtttcctccacctgttcagggtaagtagttgaaagagaagaaaccagagtggtatatttaatacacaatgattgagcataaaagtttgcatttgaataacagaaccaattttgaaactacattatagtgactttaaagagactattaatcagtacaccgacgtctattgaacttaattgtatgtgaacacaaaacaattaagacaaaaataatatggactttttgtgacacaggcagggcactctagtttttacacttaatcagcatacacttaaacctatctgataagtagactctattcagtgagaaaatcgatttagaatattgtgtaacacgtggagtaggggatataacaaataactcaaaagtaaattggaagtgaaaataaactcctagaaaatggaactttctccttctccacctaattttgaagagtatcaaaaataacacctggattttttagactcctattaatttcttgtgaagttttctgctatatttacatattctgttcatctctcaatatcaaatgcagtgtttggtaactaaagggctaagaacctaataagtaagacttttaaaatttaaaaataatcgtaaatgttgattatgttttatgactataaacactaaggcccaagtggatacatgaaaaagaaatgttttcctgtcctctaaatatgaagccttcctgaattccacactcagaatttagaatgtactattacaatacaaataaacctgaattataatataagaaaaaaacacagataaaaacgttgcatatctttacctttaatgacatttacctcttcgtcagaatttcaaaccccatcccgttttttaaggtccatttctactggttcctcctttatcgtgccttgtccgatcttctccaagaaaaaaaaatcaagtctctttcatagttccttcacatctaacttctatttattttatggcatgcactatttctaccatggctatattattgtatatatgagatgccagactagacaatgcattccttgacattcaagcccacttttaggtcatcttcaacactcccctgtcccagcaaggatcaacacctagggaatgtgtgtgggacagatgggtgaatgaacgctgctgcttcttggaactcaggcctttgagcataacttgcttggcatcctctgcatcaaaaaaatgttcagtattgtttcacttgcgccagaagagcttgtctggaaaacgtctgataagccatggtaagaaacaacacacaacccccggatctacctgaattatctcagcctaaagttatccgatctcgcttttgctagtgaggcgtgtcaataaagtcaaacccaagtttgagctttgatttcgggcctcagctgatgacagctgtgccgagttgatttaatgggttctgtgcagataaaggcggggatttgcaatgttaaaagtgtcttcacaggtgagaagacaaagatctctgacatgcttatttctcacagttcaggtccccgacccaggcctggaaacacatcaaaggccacacctttccttcttttcatgctctcagtcggccttctctcactttcagattgcacccctgcacgactcaccagtcaaacaatgcagttattatgctcctgggagaagaaggataattacctccacggccaggtgccagtagcaagtttccctgtggccaattactgtgtggtggtaaaacagctgaagctctgtttttaaaatctgtgttgtgttttttttaagcctttactgtcatgttgccagacactggccctgagccctgctatcgacacagggcgtctagctttgttttgaacgtgggttccattgtctttcactctctcccaacctggcatctcattatgtttatatctccttatcagagccaatgagcaaggggaaaacagcttcagaaaggagggagctgctgccccacagtttccatttatccaaccaaacccaaactgttttcatccctcatcagctgagatggagtgacagtgactataaagagaactgattggcttggagaaggtgagcatgattttaataagaagaaagtgaggacagtaatggagctttttgtcttttgagtgacacatctggaaactccccactggccttctccattagtttggtgaaaacctatcaaggaaacaaacaaacaagcaaaacacaagtgaatggcattaagtcctggctgcagaatagtacttcttgtctggggacagatgtgtgctgtgaaatgtttatccaccaccccacatgcttttatttgcagctgatgctaataattataaccaacatttcagaaatacctttaatatgccagacatcatcttaagcacacatgctttctcctcggtcacctcaacaaccctaacaaggtagtattttactttccattttacagaaggtgatcttgaagcttggaaagattagcattacagtgttacaaagctaagaagtgacagaagataggtctatttcataccaaagctcaaatctcaactacactgctctaaggggaacctctcacctccactgggctacttaaggggaaccagcgacccgacagccacaaggcacttcagaaaaaaacgcacattgctgagggtctaggaactcccaccacatcctcactgcaggtcctttattgctttacttgcctagttgagcatcaaacaaccttagttttttgagagtgccactattttatcaggtgtgttagttttgtgtgtcaactagatgagccacaggaagctcaaatgaaacgtgatttcagggtgtgtctgtgcgggcgtttcagggtaagattcgtatttgaaccaatggactcagtaaattagaattccctccccaggatgggtgggcatcacccaacccactgagagactgaatgaaacaaaaggcagagggaggaggaattcattcttctacttcctgcctgcttgagctggtacatctcacctcatcttctccagctcttggactgaaatttataccatcagcatccctgcctctcaagtcctgagacttggactaaattaaaccaacagccttccttggtccccagcttcttgacagcagatcgtgggtcttctcagcctccataatcacatgaaccaattcctcaaatctcctttcatatatgtattttacacatatatacacacacacaaacacacacaccaacacacacacacacctatagatacactcacacatctaggtatctgtacatatgtcctattggttctgcttctttgggagaactctaatacaccaggtgtttcaagcaaagaactttgctagcctgtagtgttaacctgcagactgctagaaattgtcatgagtacacccatttcttttagctagtctctgggatctagtagataggatcgcataaacttcatggttgacaaaccccaaccatatggacgtgtcaggaggcctgttcccatatttgaacacggcttctgcagcttctgcaggtgcagatggtcattttattttgctgaaaactaagtgcatacattcattttttttgtgttcaactctggtgccaactggagtcccccagtcactgaagatccagagatgagctccagtgccttttctgtgacttgtgtaaagtagaacagaccagtccccaagaggttttcagactcttttggtttggaggtgatacggtttggctgtgttcccacccaaatctcatcttgaattgtagctcccacaatccccatgtgtcatggaagaaccccgtgggaggtaattgaatcatgggggcaggttgttcctgcgctgttctcgtgatagtgaataagtctcatgagatctgatggttttataaaaggcagttcccctgcacacgctctcttgcctgccaccatgtaagacatggctttgctcctcctttgccttccgccatgattgtgaggcctctccagccatgtggaactgtgagtccattaaacatttttccttcattaaccagtcttgggtatatccttatagcggcatgagaacgaactaatacaggaaggatagggatagggtgggatgggggccctggagcagacgatcaaggtaccaggtcttctctggttccctccatctcccgcttctgctgcaacagttgtgggtcacatgttttcctgcaccccatccatgttgtccctttcatgctccttgggtccagacagaggactttagctcttattagccccaccccaccccaccccctctgccacacacacacacacacacacacacacacgaattatggactgaatgcttgtgcctccctcaaattcatatgttaaaaaccccacccactaatgtgacagtattaggaggtggggtctttgagaggtaattaggaatagatgagctcatgaaggtggagccctcatgaatgggattcacatccttatgagtcctgagagagcttgcttcccctccttaccaggtgaggacacagcaaaaagacagcaatgaaccaggaattgggccttcaccaggcaccagaactgggaaaaatgagtgtctgctgtgtgagccacccagtttacagtattttgttgtgacagccagagctcactcagacagggacacacatgctcatccctcaccacacacacacacacgatcgtccccctcacacacatgcacacacacagacacacacataggttcacctctctgtcctctctttctttttcttggatacacattcactttcattctcatacacattcacagacacacatgttcacacagacacacatgctcacacatgcattctcactcttacacacacacacccttcctctttctctttcacatacgcatctgagaaacctacacacacaaaaaaccctttatatataatattcttatacaccacaggtatggctttggggaagttgaagagtgtcttatgtcacacccttaactacttaaatttaaacgttagattctcatttataaaagtcttttgcactttctgtgattcttctgtgctctccctcttttccttcctttctcttcgtttctccctcacctcccttaatacccgcttcgtatccagcagagagcagctagttggctttttgttcctctgtcttctgcttccagggtcttcccttttattcctggcagctttaggaagtacaaagtttcatttatattcacattttcaaaaaataaaaagaacttgcacaattataaaacatagtacaatgatatcaaacaaatctgcaatcttgataatgagaattaatcaattataaatgcaaatgcaaatctgtagattattctagaaaaataaataagtggtctttatcctattaaggaatctttagtaagcttgcagcttgatccaatctgatcaggtgaaactgtattatggtttcattgaaaacattagcctaaatagataaaagataagataatcagcttgttagcaacttttaaaaactggtaacttttttgataatacttttcagtccctttccatcacttggcagttaattcaagtgatattttctctcaatttcagctaagatgcttaccaaagaggacatgtcaaaatcataactcataccctggctgtcttaggctagctagggcaatgtagcatggtggttagcacataggctgggctggtaagtccagcaaacgtgggtgtggatcctagcctggtcacttactacctgtgcaactgttatgggttgaactgtgtcctcccaaaaaaagatatactgaagtccaaacccctgtgacagcccctgtgactgtgactttatttggaaataaaatatttgcagacaccatgaaattaagatgaggtcatttgggtgggccctcattcaagatgacaaatgtccttataagaagagggaagtttgaacagagatgtgcacacggagaagaagtctcagtgaccacagaggcagagcctggagtgatgcagcacaaaccaaggaaggccacgcattgctggccacaccaggagctaggaagaggcaagggaagattcctcccaaattctcagcgggagcatggccttgctgacacctcaccttagggtatctagtttctagaactataacagaatacatttatgttgttttcagtcccccagtttcacccagtttgtggtactctgggatatcattgcaccccgtttgtgctgtggtatggcagttccagggaactaatactgtaaatctcataatctccatctgtgtaaaatgcaaatcacaatgctgatagtagtgcttccctaacgagtgtattatgaggattcctcaggcagacatatgtcacattctttgcacagtatccggcacttattagatgctcagtacatgttgcttttattaacaaatgttagttattatcagacataaacagctgaggtccctgcactccaggcagttataacgttaggggtctcatccatccacccaagatgccaaccatttctagaacatgtctactttaatatctctagctatacaactgattgtaattttgtacttattaatttagggctacaaacatttcctaagaaacgttccataaatagttataaaaaccattgaattgtaaggaatgagctattaatctgagccattgggcattaccttgatatcctcttcactacccagaaaattgttaaagggaaccttccttgatcagtaagacctgagcctcctgtaagatctgctgccttcccgtttctctggattctgtaaccatgaaagttgacttttgccttgatgctatggaccaagcccggctctgacaaccccacagctaagatgtttaatggatagaatataatgtttccttccctatacttcttattctctatgatttttaaattttctaaaataaacatgcattattgtaataatttaaacacataagatatgttttttcatattcaatgctactttcaagtagaatagagtctgatagaaaaatataaaggaaaaatcatatttctgatgtacatttgtaggaatgtagtattaagctacaaaatgctgtgcccacaatctgtttctagatgagcctcggtttccttatttgaaaatgatgctaacaagggtgtacctctccggactactgtggagactggatatcctatgagggactatcacagggtctttaatgcagtaagtgcctagcttcctgcttctcctccctttatatttctcgtaacttttgaataaatttccatgaattcaagaaaaaacacagtctttgcttgttggtaatgttatctgttttgttttgtttttcctgaatcatgtggaaggtagcttctgaaatgtctcccagtgacccctgccttctggcagtcacagtcttatgcaattgtcttcccttgggtgtgcactggccctggtgacttgctccgaaggaacagaattcagcaaaagggatgggagttcactctgaggttgggttacaaaaagactatggctttcattttgcacagcctctctttctctctcacttgttcagccaccacactgtgagctgccccatgggaaggcccatgtggcagggaacggagcgtggcctcttgtcgacaaccatgtaaacgagcttgaagtggatccctccctagctgagccttcagagaactgaagcttcagtttataccttgattgcatctttgtggaagaccctgagccagaggcaccccactaaggcatctggattcctgacctgcagaaactcagagatagtgaacattgttgtatgaagacactcagttttagcataatttgttgagtagcaatagttaactaatgcagatcaatacatttcatgcagtcattctctactatttttattctaacccttctaggtggcaacaatctccattttgtcacacacatactctcagacaacagtttgttattctcactctcattgccccctagtcctgtgttctgcagaggcctagctagatgctacctattgataaaacagatgatgcttctttcctacaaatgccccactctggtccttgactcatgccctaatagaacccatgtccctgtgaaagctctctcaaaaactaccttttccctcaatgcaatgagtgtgtagcgcccaaatatggaggcttgtgcaggtgcgggatgccacaacctcaggatggagtggcttccaggagagtccacataagtgaagaagggctgtgctgctgaactactaaacctaaggacgatgtcaagatatgcctgggaaatgacagcaaactgttgcacaggaatgactgagaatcacttcgccaaccaacacatgtgtgacgcagtccactgattttttaaaaactgctgtactgaggctgggcacggtggctcatgcctgtaatcccagcactttgggaggctgaggtgggcggatcacaaggtcaggagatcgagaccatcctggccaacacggtgaaaccccatctctactaaaaacacaaaaaattagccgggcgtagtggcaggcgcctgtagtcccagctactcgggaggctgaggcaggagaatgccgtgaacctgggaggtggaggttgcagtgagccaagatcatgccactgcactccagcctgggtgacagagtgagactccatctcaaaaaaaaaaaaaaaaaagaaaacaaacaaaccaaaaaaacccagaaaactactgtactgaagtatgattcatgtacacaaagctgtatcactgatattttaaaatttgaatctctcctgtgtttacaaacggaagggaaaaagaacaatgattgtaaaaaagcttttgccccaacagtcaaatattttacctctatgcaaataataataattataaataattttgaaaaaagtggccaaactacaaaaaattctaatgagtatttttggcttaattgaattaaaagcaataaaaatagaagttcactcaagtctttgtcatatttaaatcatatagtcacagtatctatgtgttaacgtcctaagaggcaaaattgccagcaatttattcatcaggtaatataggtaagtagagagcagctttttaggctaaatattttagttaactattttaaagtccccgcacagtaatacacagaaccccaaatcatgctgattttgttgttgctgtcactttggaatccaatatcaaatgtcctctggccatttcctccttggtaacagccagggcagttctgaaagtacatccttccccaattttcttagaacttgtagtgtttgtgatatggtttggctgtgtccccatccaagtctcatctttaattgtaatccccataaaccctaggtgtcaagggagggacccagtgggaggtgactggatcatgggtgaggttccccccatgctgttctcttgctagtgggtgagttctcagagctgatggttctacaaggcagttttccctgctcttgaatgctctctctcacctgccaccatgtaagatgtgcctgcttccccttctgccatgattgtaagtttcctgaggcctccccagccatgcagaactgtgagtcaattaaacctcctttctttataaattacccagtctcaggtttttctttatagcagtgtgagaatgaactaatacagtttgttttcttaattttcatgtctgagcacagaacagaattgagaagtaagaaaaattatatgtaggaaaattttcccataattattccttcaatgtcattgtattccaacggccagcaaaaataaggcgtgaataatatcacaacctcattgttgaccttgagaaacagaacttgacttcaaaagtcaagacatgcccgactgatggagcttaaggccaatgaaaaaaagaatgatagagtcaatgactgggtggttaaggagacataaagaaaccagccatttgaatgcgctcaatggaataaacaacctgcaaaaattaacccatgagccacagtgtgccccctttttgatcagctcctgatgctgtttggggtgttgagatagcccctagaagggatctgggcacatgctgcattgctcatgaactgtctgttttatgaaccttggactttgagatcttggccactgctgcctggatgatgttcccaaatcatatctggtcagtgtagagagagatgggaatctccacattccacgatgttgccagctcattgagcaggtactccacagatgagttcagtcctcttcatataattccttgtgagtcatttcccagaataagcccaggcactttgccagtgtattagtccattttcatactgccataaagaactgacccagacagggtaatttataaaggaaagaggtttaattgactcacagttcagcacagctggggaggcctcaggaaacttacaatcatggtggaaggcaaaggggaaacaaggcatctccttcacatggtggaaggaaggagaagtgcagagcaaagggggaagagccccttataaaaccatcagatctcgtgagaactcactcactatcaggagaacagcatgggggaaacctcccccatgattcaattacctccccatggtgtcttccttgacatgtggggattatggggattataattcaatatgagatttgggtggggacacaaagcctagccatatcatcctggtacatgggacaagtcttgccatttctcttccataattcctttttaacaattgttccttgcccagacttaacttctttctgggttgcctgtttttatatttctatacctttttgcccactttaattatcctgcacatctaaaaaggtacgcacagccaccaaaatatgtgtgtgtgttttctgctaacttacaatttcacaagctggagaggcacttaggaacttcagttacaatatgttttcagtctttgacataataaaacatacgccacatacaaatgaagtttagcactcaaatcagttaaaaatcttcctacatgttattagaaggggtgatttcatcaggcatgtttcttaaatcaatatgcaataaagtctaaagtgaggtcaacccatttaacaatcgacacccccacaaaaataatagggatgaggtgggaagggcgtaggtcttagtatttattatgtttccattaatattctgcagctctgtgtagctctcctgggtcatggttctcaactcctccagggagtgaagtttgaagctggagaagtggagaaggaacacagaatttgttctcaagtctctaagtctcaagtctctaaggtgattacttctccctgcttcttgacaaatccatcagctctttccaaatctaaaaaagaatcagggatatgccatgttttgggaataaggtgtatagtttttttttttttagaggtaatacgtttgtgtgtcatttatcagaaaatgtaggtattgagtcaagaaataattaaaaatcacatattttgcttccttgttactaaacattagctattatgttacaatgtaataattttaaaagtaagcaggggatgactattttattaaatttaaataataatatgtaatatcaaagagatggtttttaggggagtcttgaaatatctttataaacagtcacatacttgaatgtatgtgtatataatataaatataaaatatatacatgtatcattgttttatattaaatgggtactgtatatatttataactatatctagatctatatatccaccaactccctcttctggggtcccatagcatcttctgtataccattacattagttctgacttattgtactaccactttctttttaaatatttgtctttctctcttgactgctcattccatgaaaacagaacctgtgatttatttgactgctgaatccccagttattgatacagtgcctcagatccaataagtgtggatgaagtgtttggaaaagaagcaaggagtggttccagattgatcaataatcatacactgattcaaaaccctgaatcacataggattttgcccactttaattatcctgcacatctaaaaaagtgtgcacagcctccaaaatttgtgtgtgtgtgtgtgtgtatgtgtgtgtgtgcctgtagccattcacaggaatattgcctggggcaagcactggaaggaggttctgctaacttacaatttcacaagctggaaaggcacttaggaacttcagtttcaacatgttttcagtctttgacataataaaacatatgccatatacactcacataggatacagtcacaggattcagggttttgaaggatgtcttcatggtacaaaactttaaactgtttgcattcggaagataaaaatactaaagctcttcctggttttcttgacattcccaaggaaaatgcttttttttttttctactagcaagtctttattcctttaataacgtcatatgattgcatcgtttctgttatctactgctgtgtaacaaagtaccccagagcttagtaacttaaatcaaccattttatttttctcataattttggggagtcaagaatttgagaaggtcttggctagatgatccacctcttttccacgtagctttagccacagggacgctggggctggaggggtcacttctgagatggtctctttactcacatgcctactccttgtgctcttggctctcctctcttctcctcccctttcttcctcccctcccctctcctttcctttttctccctctccttgtgacatttcactctatagagtctctccttctgacttgggcttctcacagcatggaagcctcagtctgtgcattcctgaacttctcagacagcaatttaggactctaagagcaagttttccaagacactcagggagaagctgcaaggctgttgtaaccttgcatgagaactacactgtgtcacttttgacaccttctattggtcaagcaagtcacagagcccacccatacttaagggttgggaacataacactctcatagaagacagattagaaaatttctgggcatctttaatctgccacaagactcataaagaagacataggaataagttctctcttttaaaacacatgggtgtattttgtgaaccagggttgcttcatatatttttgtagattcattcaattaattaattaacaaagaaagaaattaggagaaatatttttggtgatgtagtatgcctgctattaacagtttacagagtttatttttgtttaaacatccatcctataatatagtttttataagtttgaaattgggtgatattattaatttgaagaccaaaccagccaaaatttgattatgatcaaaatgaaattaaaggatggataaatagttattcccatcaaactagactccaaatatttaattaaactccaaggcttttaaccaaacatttattcccttagactcttttcatttattcttataaaaatccttgcatttataattcattttcactttactcagcaaatgttcttttgtaatgagttgcttgatattcaaaagacttctgagtctctcaattctatttctgtcaaaatcaggaagttgacttttgccaagaataaatgaacttgaatacagagttttaaatgtggttcaaaggatgaaatcctcaaatctcaggcccattctgatgctggcaagaccctttctcctgctcagactatgaaataataatgatgctttttaacaattaaagctttgggttcccaaaaacctgaatctgttgctaaatttcacttaacaacaggatcttatttttatctttagcaaatatcctgggacatgtataaataccagggacaaactgcattacagatttaaatttgggatgaaaaaatcaatatttcaaagtatgacaggaacagattctataaaatgaagacaaatcagatactgcattggctaacttccaacaaagaaaggacacaaaaaattgagaaagtgaagtgaaatattaaatcatataataaaacttttcagatatgattttgaaaccttggagtcttaatttaaaacataagagaaaaaaatctaatttaaaaatgttagtgttggccgggtgtggtggctcacacctgtaatcccagcactttaggaggcagaggcaggcagatcacctgaagtcaggagtttgagaccagcctggccaaaatggtgaaaccctgtccctaccaaaaatacaaaaattagtcgggcgtggtggtgtacacctgtagtcccacgggaggctgaggcataagaatcacttgaacccaggaggtgaaggttgcagtgagccatgatcacaccattgcactccaggctgggcaacagagtgagactctgtctcaaaaaaaaaaaaaaaaaaaatagtgctcttttgtcattcaattttttgaaatgagtgacgttaaataccaagttgtaattgtttggatgaatatatctagaacctgtaattgtagcagaccaaagaatatatgagttatttgtgagcattaaccaagcacctcctagatgctggaagatatttttccaaagtggattcttatatcttcctcagaaactttcaaatggacttcttcaatctgatccattaatgcaattacattttcattttcccattttacttagtgcaaagtcaagttcaaggaaattcaattgtatagccaattgttagatctccttcaaatcaggtccaaactagcaacatatacatacacacatgcttcaaataatcacattctagaatcatcatttatctaaattacagtgtgtgaataatgaatagtttaatttggcttcagagggtagaaaatattaggggccagaaacagtaggtttgagaaatatgtacatggctgtaaacccagtcatgcattcttctcttagttactccaggcctaggactgaagacaagcaaacagaaagagaagcagtactcatacgtgtgtgcttgtgtgtgtgtgtgtgtctgtgtgcgcgtgtgtgtgtgcatgcgcactattcgtaatccagataagatcttccaggtaagcacaagcaattgagattcagttcattttatcattgtttattcttttattcaatattaatgtccgccaagtgccaaaaatggcattagaaatgtttttggcagagaccactggtgcccactgaatatccatagctcctccatatttcccagtagttccaccattccttgaagtgtctgagttcttcaaggtctggcaaaagaaaatgtgagcacttttgttctggggcactcagtagtcagtgtgcctcctctgtccttaatttccctgccagggagacttggaaattctctatcttttctattgctgttataacaaattatcaccagcttactgtcttaaacaatgcaaacgtattatgttacagttctggaggtcagaaggtcaacatgggactcccccagctaaaatcaaagtggcagcagggttgtgctccttctgaaggccctaaaggagaatctatttcctccattgttttcagcctctagaggacatctgctttcctttgcttgtggccccttcctccatcctcaaagccggtaatggcagatcaggtacttctcacatttcttctgtagtcactgttctctctgatgcatctgggagaggttctccgttttcaaggatttatataataggattgggctcacctggataatccaggctgattaccatctcaatgtttgtaaacgtaatcacatctgcaatgtccattttgccatgtaaggtaatatatgcacaggctctgggaaggaagtgtggccatctttcaggacccttattctgcctccatagaagccatatgggaagatgctgggatgcaaggtaaagggggcctggatctctgaatcaccacatggagaacagccattatgcacccatgttcaactctgaacaacaagacgtaaacttttttataaatgtccatgctgtgagatttgggggttattctgtgtgacagctaccatcaatcattctaactaccatggtgatggttaataatttgttcaggtttgttttagctttgtagcaaaactacaaggctagactagctggactttccattccaatagatataattaatatgcatttgcagaaataatgtctcccttgcctttaaatctccagccattaatagagagcctaaaacaatacatttttgaatggaattgaatgaatgaatggaagcaaaaacaagaaaacacataacaataacaatgaaaaatgtggacaaatgagacaggtagacctattttaaacaattctttaagtgaagaggatcattttggtcaaaggctattgttctttcctgggctgatacgaggccaggatttctctgggaatcttccactcctactcatctcacgctcaagctggccagtccacagaaggagctccaggggagcaggattttgtggtccaggcctgtggccaaaggttgagccctaagaaaaatggaccactaaggagcacagtgagagcagtttttgtcatccatcagaaaacagcatagactttggaaacagttctgagtacaaatcagagctcaacaaatacttagcagtgtggttatgggcgagtaactctgagcctctgtttactcatctatgaaacaagataataagcctaccttgcgatggtgatgtgagaatttcatggaacataactaatatagcacagttccaggcacaaaatgggctttatttgtattattctgagtcaatagggaaatcctgagagaaaagcaagaatgggtttagtttatccttctatcctgataaattcacctaaagctttctctagatctgaaagtttggaagatgattttattcaggcaatatgtattctgattatgttattttgtatcctagcaacctagccagacctagaagaatttcaagatcgacacttaattgtaaaactttagatggaataatcatgtagatttttgtttgttttaaagccgtgtattaaaaagaaaaccattatcatcatgtataaggtgatgcaaatacttaattagcagaatttagtaaaacattatttctaaagctgagattaatgagctctcaatgtatggaaataagttttaaaaaataatcaatgagaattgttaggttttatttatcttctaatagtttactgcacatattctcaggtcctgttaggaaaaactaaaatattcactgtctcatttggaaagaaataaaccatgtaaaaagaagccagcaaaatccttttatatgtaacatgaagattcgaagaggctataaatattaatttcaaaccaagatcactcaaataggagggccctcaaagtgatattgcaaataatttcaagttatgcaatagctcaaatggacaaagaacaggaataatttactatttgccatatgcaatggacaggctgagcgaaacagcattaggcagacaaaacccattcaactatgtcaacttagatttatccgaaggagtccaatgacctgctcagattgttaatgaccatgagagcatactttcttaaaaaaaaactttgtattttagaataattttgatttatagaaaagttgcaaagataatacatagtttcctatacccttacccactttcttctattgttaatatcttacataactgtggtacgtttgttacaactaagtatgcagcattggtaatttctatgaactgagtcctaccttttatttggatttaattagttttcttcctgacatcctctttctgttccaggatgccatcccacattccatttggtcatcattgctccttagtctcctctggtctgttacttttctaagacattccttgctgttcatgaccttgacagttttgagaagtaccacactaaagtgttttgtaaaaacccctccatttgctttgcctcgtgcttttctcatgactagctgggggttatgggtcttgggaaagaatgtcacagagaggaagtgcccttctcatcacaccatatctggggcacatggtatcaacacggcttatcactgatgttgtcaatcttgatcacctggccaaggtaagtttttccaggtttctccactttaaaggtagagcagcagtgacttttctccatctttccatattgactttttagacgcaagtcactaagcccagcccacactcaaaggggcagggagaagatttgactccacctcctggaaatagagacatctattcacaactcttctgtaagggagattccccgtttcccatttgtgtatttgtttattcaattatttgtttatatcaatatagactcataatttatatcagtatggatcatggaaatgtatgctttgggttatagtccaattctatgttatttattttcttgctgaaattgctccagctttggccacggagagtttgttcaggttggctcctatgcccttttctgtgtcctcaaccttttgtttttctagcacttccttactttctgtaattagaaattactccaggagcatcttgaatttttcctgtcccagtcctagaatctatcatgttttcatctatttttaagaatgaaagaaaattattccctttaacctaaaaatgggcaaattcacagatatctcaaaatatcacttgtgtttagatttgttagagatcaatgaagtggctattttgaggagcatttttctgaagaggcattatctctcctaatggagctaatgatatcaggtattataagagtcattaaaatttagaatctggttggatgattgatccgtttttgcaactccgaatattttagtgacaaacttctagccaaaacatctgcatttatatgtaggtgaaattaggtattctcctgccaaaccgaagaataggtctcagctgggatagctcctaccagagagaaatttgcattgtcttgaatgaaaggggtttcagttgaaatattagttgggttatgcctgtaagggtgtttcaggatgagattagcatttgactcagtggactcagtaaagtcaattgccctcctcaatacaagtgagcatcattcaatctgtttaggaactgaaaacaacaatcacttattgagtcacagttctgtatgttggcaatctgggcgggcctcccctgggaggttcttctgctggtctctcctgggctcagccatgtgatcatccaatgccagggagacggaaggagtaacttgtgttgatagctttacagtttgtgtttccagtctgttataagaactgaccataccttgttcctaggattctcgaaatgcatctgtatacttccaactatattgcctgaatctttgataattcaagtgagtttctgttcctttagacaaaacaatgaccaagaaaagtttctttaagattctattttaatgtctgtattaattagaatatgtattatctgtccttctaataacaaaattcgacatcccggtgatttaaaataataaaaacacaattgctgctcatccagcagaggtggcattggacgctgtctccctggcattacccaatctgttaatggaatgaaaacagcaatcagttattgattcacagttctgtctgttggcaatctgagcgggcctccactggaaggttcttctgctggtctctcctgggctcagcggcgtgacagcagtcagctggtaggtgagtggagtgcagcagcctggtcttgcctcacgcacatgtctgccgctgtgttccgactgtcagtgaggccctccctccacatggtctctcatcctcaaggaggccagcctgggcttcttgcccccagtatatatttaacttttgagttttgtgctttcagggtcaatgtttttcatctctggattcagaccacaagtcacatacaggcttgtgctttcggacaagtaacttaactgctctaaacctttgctatgataataaaaggagaacagatacaaaccgcataatgcgatacctggcaagtggaaagtctcaaaaaccatcagctactacaatgagtattgttgttgttgttatttttagtattattattaaatctaacacatcccttccctgccacgaggttaggtgtgatcatgtgactgacttctggctgaaggaatgtgagaagaaatgacacaaaccatttgtaggcctgacccaggaaaacttctctgtgatcctctccacactttttctccttcttggtctgccagctggatgacacaaaaaatctaaagagaacttggggaccctaaggaatcaggagccacaaattggaaaggtcccgagtctttgtgcgtacctgtgaaaggccagtcactgagcatccacatctagtgcatgagctggaattatatttttattattttaaatcactgagatgtcgagagttttgttatttgagggacaaataatatgtatcctaattaatacagacattaaaatggaatcttaaagaaattttcttggtcattttttttttctaaagaaacaaactcacttgaattatcaaagatttgggcaatatagttggaagtatacagatgtatctcaagaatcctaggaacaaggtacagtcagttttcatgacagacaggaaccacaaactgtaaagctatcaacataagttactccttccgtctccctggcagtatatggaggcttatttctggttttctgcgtgctctttatttctttctttctgcctacagattggctttctttgcttctcaggttgccctagagaccctctcagagatgattggctcaagctgagccaaaatgtactccctggtcgaaccagctgtgactaaagggcagagccaccttgcacaacagtcagttcccatagaaagaaggggaccccccttggctgggcgcggtggctcacgcctgtaatcccagcacttcgggaggccgaggcgggcagaacacgaggtcaggagatcaagaccatcctggctaacgtggtgaaaccccgtttctactaaaaatacaaaaaaaaattagccaggcgtggtggcaggtgcctgtagtcccagctactcgggaggctgaggcaggataatggtgtgaacccaggaggcagagcttgcagtgagccgagatcacgccactgtactccagcctgggcgacagagtggaaaaaaaaaaaaaaaaaaagaagaggacccccaaagtgtccctaggaacattagtgggattagacagaactcctgtttaactctctggggtaggtgtcagtgagaccaacacttcccattttactttgtaagtagtccttggtttttacaacttgcccatcaattgattaaaaaaaaatttagtggaagagtcttccctttacttgtctattataattaaaactatattgtattttttaaaatagattttatgtttttaagaatagtattaggttcacagcaaaattgaggggaggggacagagattttccatatactccctaccctgcaatgtgcataacattccactttatcaatatcccctaccgaagtggtgcatttgttacaactgatgaatctaacttgacatattattatcacccaaagttcatagtttacacaacggtgcacccttgatatcccttggaattgtatctaaattattaagatgttatattctaggctgttgaagcaacatgtatcactatatcatccatcaacaaattttagttttgtgctgttgaacttcactcggatacaaggtggaatgttttgttaaaatacttgaaatctcctactggccttgacgtttagataagaacaatttgtcagaaacctatctcattatttccaggtagcaggattcatgcagagtgtttgcaacacactgatgctgtcttaatgctgaacaatgctatgttttaagctttggaaagtggatatctcctgggtttactctcgagctccctgttggaatgattttatacttcagctctcagtgggaatctgcctccaactccccagctggattgctttgctacattaggggccaatcagcagaagctgtttatctctcagaagagtatgagctgttgtttcccaacacacttagtgctcccttttcagagacataaactgtcattttcagtaagtaatttctattgaatcactggtgccagataactgaggatgataacaagagtgagatggttgccatgaaaaattgctaatataaaatgtgacggcccttctcagcaaactaacacggggacagaaaaccaaacaccacatgttctcactcataagtgtgagttgaacaatgagaacacatggacatagggaggggaacatcacacactggagcctgtcagagggcgggtggcaaggggagggagaccattaggacaaatacctaatgcacgcggggcttaaaacccagaagatgggttgatcagtgcagcaaaccaccatggcacacgtatacctgtgtaacaaagctgcacgttctgcacatgtatcccagaacttaaagtacaatttttaaaaaatgtgatggtccgtccttagcttgcacaagcaaggatgacagaaatgacaccagagagagggaagcaccacaaactgattaggtagagtaattccaggggtctttttccagagatacctccctgttactgagcaagggacaaggattggggaaggaaaggtgacattgttgaaaaaatacacaaagatggcatctcttaaaaaggactgaggtttctgccttcccttagattggagctgtgaatatgtgaggcagatttgaaatggaatcaggtaattaagacatatccagggcggggagagctttcagaaagtctgaagtgctggccaagactgaggctcagggaaagtcagagccatagaaaccggccacaagctgcagagactcataagatatctggacccaaatggctcaaccaaccatggagcagatggaggacagtcagaagagcaggaggttcaggaaatctcagctaccgtatttccatttatcagttgtctattgtgtgttatttgccatttttgacttcttttctgattactttgtggtagagagttctgaagagtgagaggcccacgccatgcctttcacattcttcagagggtctcagggtgcccataagtgcaagcttgccagaaaactagaaagagcacccatttgcagcacttaccaaggagaggcactttagtaagggctacacatctccaccagagtccaggaataaactattatcatcattacattacaaataaggaaaccaaggctcacagaagctatggtacttgggaaaactgggacatgaatcttgttctctataacttcagagcccacctctaaccacagaaatctgcttctctctagctgtatgggataatcaaggaaggtatactcaacttttattgcatgaagagttctgatgtgcataaagagctctgatgtggtccaagaatcaacagctgtgtatttcttgcttctttgttctggcttcagacactttgtggaggagctgactttggttggaatggttgggtcagataaattatttcagggctaagcagagttctcagagatgcacagccatggggcattacagcagcagcatcacagccatagttaggagaatgaggatcagagcctggtgaagctcatgtatgaacttctgggagcctcaagttttgggtgcatctcagaaatgaaaatggtcagcagagtgcaaatgcagaagcagtaggcaggactggggttgtcccaggcttcacagcaaggaccctcctgctcccatggtgctgagcttcggatgcggttaggaggaagcacttactgcacaatgtgggggaaggcatgacggcttgaaagaagcaaagacatcaggaagaactgcactgttccagtgcctttgggatgctatttttcaaaagaagctggttcctgccacccacccccgacattttgaaattcagcagaaccatcactgttggcaaacatttgctgctgactctctgaaaggctatgttgttatcttatcaacccggctgactcagagaaccatgcgtcaaggaggggcgagagtctagtagattagatgcaatctggggtattccccagtctggggttatgattctaggatggcatgatgcctgttgatgtagcctactgcctggccttgttttgggagcccctgctccccaaactcactttggctgccattatccaagactacaggtgaccattttacctcagagtcttcctcttcctgggagtatccctgtggtcctctgcctccttggcctctctgtgcagtgttcttggtgtctagtcacttaatgccacagactgtacagaagacctctgtgtgcacctttgaagtcatctagaccattcccatcccattcttccttcagtcactggagtttatggacaatgcattgttacagaaaacccattcttgatgtctttggagtccatgggttttaagaagcaaattctagcagggctaagagcctgcaagggtaattaatagatgactagaagtcagtcaattagcagatctcattagaacgtggtctttttaagtcatcaattgtctcacccagccaccaccgatgtggaagtccagccgacacctgcagaccactcagcacatcacagagcacaactgccagggggggcttgtccattggatttgggctgcctggcctttgtgtgtcacccagtagaagtgaggcccacccacgccataagagttgctgagccgagtgagaactgcctcatggggacactcctactcttggccagacatcccaagcactcctaaagtagaagtgatgatgctatggaagtgagagcataaggcaactgggcttctgcaggaatacacggcggttcaaactcaccatgttacagttgggaacttgctcagggcataagcccacctatgccagctagaggcaggcaccattaccctatgcagggctaagcagaagaagcatggggtttaagtttaagcctagagcagacaggactcccactgacccttggttcctacatcatacacattatgtttccaatggggaactcaggaggagcaaggtaatggtgccctgtgggcgaggctgtacaagggacattctagggcagaggtaggatggctgcaagctggggagcagcagggctacagtgccagtgagatccagcagggctccaggaaaggtcactgggtcttgtctatgttgggacacgcagtggcaggctttggcagctgtgaacatcagcagttagtgccaacagggcatcctgtgatcaattaggataaggatatgttcaaggagtcaagaggacccagagaagaaaagggtacctgtatccagatatgaggaccccattccacctctgccctaatgacaacataggccacccgctgtgtctagatgctatcttgaaaagaagaacttggctggccagggggtatggggcaaaagggaaggtattagaaaaaaaaaaaagttaaaaaaccttgaaaaaaattgacattttcccaaaagaggtgacattaatccaaagtaagactatgttttaaatgatgtacattattaggcagttgtggccatctagaatgatgctgcccaatataacagcccacagttgcatgtgacaatttagatttcaatcagctaaaactaaataaaataaaagattcagttcttcagtggcaccaatcacatttcaagtgctcatagccacatgtggctcttggctaccatgttagacagagcagatatgggccatttccatcatcacagaaagtatcactggacaatgctggtctaaaacacaagcccaggatagcaggcctcttctctgtcttattcaccacagtatttgcaggcatctagagagagcccagcacataagtgaaatacggtcaagaattttcctaaagttcagctctttaaaatatggtcctcatcaacctgtccaggctttgtttttcattatttattcattcattaaacatagatttatatttactgatgtgccgggtgctctgctagatgctgaggatgaaaaatgagacataatctccatcctcacagagctcacttctactgggaagacagcaaatcgactagacaactggtccacccaataattacaggtggagaaaaacactataaaggaaagaaacatgatggaaaaggccacaagcagctgctgccaatagaatagttggggaaggtgtcttcgagcaggggacactccagccaagaccagaagctccttgaatccctcttcccagtctgccacagtgggtggtacctaaaagcactcagtcaatagtcggtggatgaatcactgagaaggagccaggtattcaaaggatcggggaagggcattgttggcaaattgggtctgaaacctttaatgtgagactgagcttgatcggtgtgaatagcagaaagaataccactaaggctggagcagaatcagcaggtgggagagagaggtgagttgggatttgaagcaatatgggggcctcttgcttaggggtgcatgacatgatctgatgtatgtttaaataagaccactctggccactccacggagactgcattgggatggggaacaggtagcaaaagcagaagcagggagttccgcaagcaaccttgggcagcgcccagcgaagagatgatggtgatgccagcttggagcaggctgagagctgtcggcatggagatgtggccacgccccactatgtgtcagtgaaattggaattagtgtctccaaggctattcctgctgtccttcctgttcggcttcccacgtccctccccacttctcctgcctcggcttgggatgctcttccctctcattttcactttcaaaattccaccttacccttcagtgctctcagaagttatcgtcccccttggcaaagtcttccctgattgttgtggccggatataatttgcctaggcttggaaaccttacagcactgactctacatgccatctgcatatgcagcatttagcacactgcctgaaatctgattgaacttggtcttctgtattgcatggagaaccactagatgacttgggcctcataaacatcttcttgtaccctctttcagggttagcacctagtccactatcttacatatgagtactcaaaactatttgttgaaggaacaaaggactgtctctgtgcttgctggtgtgtatcgttctcttcatttaacatctcatttttatttgcataaccccacctctttgaatatcatttgctaaccaactctatggaggaaatacaaaactattcttttaaacataggatctgtccctggtgggctgcacttggcagcagcaatggtctgaaacctccaaagacttggtaagagctgtggggaagtgcaaagagtgttcaattaactctccttactcaaagtaaatggaggtacttaagccaacagccgtatattctcaattgctcttatgaccagactgtgaactccttaaacacgatttattcatctcagttcgtgcaacacggcatgtgcctggtgcacagtaggctctccagacatgttggttgaatggataaatcataatatgagcattgagccttctgctgggcccacttggaaggcaataaaccgcatagtggtagctcaccccggaattacggagtcctctgagaggcaggtctcaccaccatggagaaggtagcactaccattttactgcacagtcttcccaaatttatgcgttaaaagtgtgcagcaagtaggtaaaaatgcaaagataaacctgatcaattgtttctgtcttacccatcacctgccaccacggagagtcattgttttctgtctactgctttcattcatctttttccttgccctggagccgtttttcagggttcctggcaaggggccaccctccttccctcatccgatcaggccagaagacagcgtgagttgctcttttccctttttcttctttgttttcttttgtaaagagtttccatgcatgttatttgtaaatatcagtactatgtgttttttggcattagcttagagtatctaatttgtgatatcttccagttcattacttatagtcttaatttcaggagcaaaaatgagaggatctctaggcaggaagctgtaaacgaggctccatgtgcagtacatgtttggcccaggtcttccatgagtattctacgtttgctaccatccctgaaataagtgcttccttcctcctctttttttcctcgtggtgaggggaggggagggggttcctcctattttctgcaactgtttacttaagcaggcatcaataattcaggacatcagctccatttctgaaagcccaggtgagggcaaagggcttagcaccaggccagcggctcatttactcactcctgcaggactccacagagattgcaccaggctcctgcccggccagacctcagccacacttgaagaggggaagacggtaagcattgacttcagagttcagatctcctttgttttctttccttagctacttaccagtttccctgaacctatgaagatgccagaggccgtctctggagtgaggcctctctgttggttttgagctgcagcatgccacccagagcagcctctgatcccagcctcagacccaggcttctgaaaccagaccaggtaaggagaatttgaatttattccttaatctgacaaatgtttatgagactcaaagatgaaaatgtggctgtgacttaagagaggcagaattaaagcctgagctatactttctttatacctaaggtcagaaggcgaccgagacatggtctcacatctgggatatgtgtaagtttcaggactgcagggatctacgtaaacaggtatttatagcctcttcctcctgaaatgattcaaggtgctgggtctctttgttctgcaattgagtctggtttctccaagaagtcctcaaacatctctccttaagttcaaaatgtctccttgaaaataaaacctaactggtctgagacattatttgggatttctagttcaaaatgtgagaaatgactcctactgccaggataaaggcacaagtacatttgtccatctctgccaccctttccacccccagccctacatgccccactcctaccttcagccgggtcacttgtaacctctgactggggagggtcatctctattttcaaaaatatccagagaagactcaagaacgttccttgatatctccactctctcatgcaatgatcctcaacagcaacacaaacttcttataccccaaaacactcagaccacttttgagagctcttcctctctttcatctctcccaatcaatcaacgatggatcatttgccaccattcttctgatagtcacaatttgattaactcaaaggcgttttacagttgtgtttatagttctgcttccatgaactctctcctgcagttgcttaactaatctttccctgccccagactttgtctagtccagtgtatactgcaaagtattgccagtctaatctctctatgacagttctgatcaagccactccccaacccatcccactccaaacaccctacccccatcaaaggtatatggctggtaagtgacctgagcgagatctctctaggagacccactgatactcatgccttacgccgagctctcggaattttccgagcatctcttttgctctctggtgtctccaccattcacctcttaagactctctcaacccagcaggctaccctccgttcgcatttctacctgtcaagatcctatccattcactgagcgtcacaggagaattgtagtttattacatagggtccttggcctacttgctcatagtaggtctagctgggaagagagacataaacacagacatttgaatgcatacagtgctttgggggctgctaaggggacagagcataggagcccttagcctttgtagagatgacatttaaacagcttcttgctgggcaggaaaaagttggccatataaagaagttggtggaagggtattgcagataaagggaaccacatcagcaaaggaaactaaaaagtgttcattagagaacatagtatgcagtcaagacgggcccaagccattatcaagaacttcccacatagcaagaaggcttggcaccacactctttgcttggcctaccttgtttgactcacctcataccctgtaaggtggatactgttagcatcgaagctgttttacagatgaagacactgagacacaaagaaatggagtaacagccaggttcacacagatagcaagttaagtgtggagcccagctttgaacccaggaatctgactacaaaaactgaactctacatagctattcctcttcagctgagaatgcagttacagaaaaaggccaaggtgccttcaaagttctgtagttagtgggttccaggtgtggctttgcatcagttacttgtgccacggacactttctcggttttagtttcttcatctatagccgtgtttcccaacagggagtgattgtaccctgccccccgccccggggcacatttggcaatatcaggatacattttggatggatatagtggaggtggggtgggggagcgctatacaaccagtgggcagaagccaaggatgctgctcaacattgtgcaatggatagcaacagggcccccaccacaaagaatgatctgaccccagtatcaacagcactgaggctgagaacatctgctttatggaggaggcttaagacccacacatgcaccccacatcactgactattctaagtgttccaggagctaacgtgcacaaaactcccgtggcagaaactattggctgaaactgcaaagttcccagggggactcgatcctcttgggtggatcttcttcgagtttacttcaatgacaagatccacgtcctccatgaaccccgtgttttcttcaaataaagtcctgcaggcccacgtggctgcctgggctgctggcagcagcctcttagctcccgctgcactgggttttctcttggaggttgcaccccttgccgtgactgtgtttcatctcgcctgttcctggcattgcctctgacagctggacttactgagagaccaggccccagatgaaaattctcagcacggccccaccatgctccctggcccaacccaggctggagtaagacagtcagacatttcttctctgcttagtattcatctttctttccccagttatctgtatttactttgaaaatcatttcctctgttttactcggtttgcctttgagcccaattgcctgctcagttccctgtcccttctgtttatttctacttctcatttttcccattgatcagatgccctggaaatatagcaggaacagtgtgttccctgtaatatttggttacacttaatatttctcagcaaaatgtagccttggaacaccaagcggtaaaaatccaggcctgctctgcttacactggacatcggcttcagcacaggctccgattcatttcggatctattccctccttaaaggggagtcacacccagcctacagcaggaaggtgcctcagcaggcgaactgccaagcatgtgcacagaaagctgtttcctcaaataagtgcacggctataacacagtaggtgcttgactgaataaagatacggcaccctgtgaaagtgccagatgaatatgctgtcgaatcccacaactcttccgtaaacacagtttttctagatcagcctttgccatcagggctactaatcctaattttccctgatgccactttatgattatgtgactcaaactgagaactaatgaaactctttcgtgccacagtcgtccttacaggcccctttggtgagcggatgaaagctatgcaacttttctccagaactgccttgcctgcctcacagaatattctgaatgttctgggcactaatgtggatgaaactcattacttaggaatgcatttgccagagactattggcttaaaccgcagtctctgaggggacccagtcctcctgggtggctcttctctgtgtttgcttcagtgatagaatcctctttctacatgaaccctgtgttttctttagaatacaatatttagttaaccctcagcagggtcccacccacgaaacccatggtttcaaacttaagaaccagtctctaccttcttggtttagaaaataccactaggaaataccgtgagtgaagcattgtttagttacggtaacagaaatcaacagcaacacaacaacacaaactcttactcaaacccatcaacagttcccacccaaagtttctctttgggcataaagatatattttcttgtgtggctttaaaaagccaggaatatgtatatgacaaagaaagacactgaaaagcaagagatgaggaaacaaattgaaaaccaaggtttttgaggaagcgtatcctcacctctcacctaacggaacagggttaataagtggcccatcagcactgagaaagttataggggcagctctgaactaaagtctcaaatatagtatgatgtgaacgtgaccatacacgccccaggtagagttctggcagcaacccgctagaccacagacccctcgcaacaaccagatctttgtcttggtcctgttctcttccactaggttgaagagtattcagttctgtgtatctgtatcactacccctaccccagccttctaaggaggtgggacacttcatctgctgagccagcaactagaccttcatcatgacgtgtggggagggggctgatggagctcccaagttttgctcagaaaaagggagtgggtaagggatgaatgggagagagaaccactcaaggtgaaaagagtggaggatgggaaacctgcatacagagacaggagcaagggaagccatggagaggatttcttaaattaaagctcccctttacttgggcttctagaagcctccatgtcatttaaagtgattagaactggagagagaaagacacaaagtggccagatagtcaaaatgtcaaattcttttgaactatgccgttatctgcaactgagatattttcacttctgtgctgcttggaggatgcagataaaatccacccactttatctggtaagaggtcccagtcctcttcatggctgaaaagaatcagcaccatacacacgtgtggatttctcttcctttcctctccatctgagcaaggcaggaactcatggtttaagcaagagaaagaaacaaagtgagaaatgaagaatcatgggcagtgtggggcaggtgtggagggatgcagtttatacacagagaagatttgcagacccaggacccagggtcaaggaagagcacgtctttccccagctcttctgcctctccactcaccatggcaggggagagattttccacagagacgagcccataatggaggcaataaccctctccagcgcaggactctgcacctccaaggcaccctttctgatcatctcagagggagaaaagccaagcccttttcttttcacatcctcctgtctttcatcccctctgtgccttgatttcaaagcctttctgaaacaaatgtgaagttgaaaggatagatttcaattattttattttgtaaaggttaaaaaggttcttgtaaatgactgatgcaaatactggaaacccagttaaaacaactggataccagatggcaaaggagagtggtttactgtaaagtgttatggagtaggagctcatttacaagaagcaattacacaaacagccctgagcatccaagatcccataaaagagtggctggggtgaaagtgcaggattggctgagcacgtatgatttccacatcccaatgtgaactgtgcaattgttatcttacctgttgcccttccactgggctacgattctaagtctaggctggcctgccaagaagcacagtcacagccctaaacagagatgcttgcactttctccatcacttagtggcctaggggagtttcctcataggagaactttaacaatacaaggagtgtaggcagctggcatcattgtattgaagcctggggaacttggtttttatctcaggtcaagagaacaggagaaaatccctttacaatctggatgccttttttctctcattataataaattgagaatgagcacaatacactttactgtccatgttcaatcctaggtatgctcttgcatgcatgtagacactgtatgcaaatcacaaaagcaaatcatgaagctgtagctgagaatttgacattgtagtttcttgctctacacacccatcaggtctgggctgacctggctgccctcctccatgttaaacctcctggtgcccatttcagtgccctgaggccaagtctctgcctccaagtgccatgacctccccaaggtcagccttctggtttatcttaccttggctagaccgggtaaacctttacatctggtaatcaacttgactgtgatctgtgctgggaagagaccatgcactcactccagaacacaatcacagggcaggtggtaacatgtgcttttggggaggctttctataaacccatacatatcccaggcattactcttttttatcagagccttttctggggggaaattacagtcaagaatgtaagtttcaccttgccaaggcagtgagaaaaatacttgtgtgcaggtgggacttccagggcctggaaatcacagtaaccattctcatggccagtcaagatattttgatcctggagaaagcaggattagaaaccagaccaccatactgatacaccctaggatgtcctgcagcccctggtccaacagagagggcctccctcaagacatactgaaatggagctggcagatcagaacctaatggaatacacctgaaaaaaagcatctgaccctcaaatgtttatcaattgattaatgaatacacaaatgcagtctaattgattaatgaatacacaaatgcagtctatcaatgcagtggaatagtatttagcaataaaggaaagtaggactattttatgctacaacatggataaatctggaaaatgtgatgctcgatgaaagaaatcagaaacaaaggatttgcatattatataattctgtgcatgtgaaatgtctagaataggccaacctatagaaaaaggaagtagatcaatgcttatcaggtgcaaggcagggatgggaatgaccgctcatagtatggggtctgtttcaaaggtgacaaaaatattctggaattaaataattgtggtcattgaacaactttgaaaatataccaaaaaacactggattatataaggataaatttatggaatgtgaattctatctcaataaatcaaaaagcatgggatgattctgcatcccagcagggaatgactcctactctcattttggggacaaccacagtagaatgctgtgtctcgtaagtttcacaaacaccttcctaaaatttttatggtagatttagcgctggagttaaagctgatttacatgagtatcttttcttcttctgaggagacacatccctgggtaatgtaaagccagattcaaattcctgttctatgttctgtgggagttgggggttgaggggtatcaaggaccctagtttgaagccagtcacagtttgctgaagttctgagcttcctcagcacaaagacccataatctaatttcaactagatctcctctgttctcagagcctgtggtgtcccctctatcctctccctcctctcccatctctctgagctccagtttgtgaggatctcaggagcttgtggaagtcatccctccttccttattttaccctcttccctaaggcaacaggctgagtccacgtcctcaacaagtgtggtcattcctatgatctgcctctcctcctgctttcaccaaacctcccaggcctattaagttgcccctgacctccttgcactgagatccatccactcatcccctccttcattcaactaatatgtactgagcgctggctatgtgctgggcactgtgccaggagctgggaatacagtggtggatggggcactcaaggtaaagctggcaatactcaaggaaaccaagccatcagatggaagtttccaccaatcagcccacaatgagcccttaagcccagcagtctgcactcctagaaggagaatacttagattacttcctttttctcactgtagttaaacttccaagggctctcttgccctcccagacacgtggtgaattccatcttcttgccatttccaatgggttggagccatgcggctagtccttccaatcccttgctgcagcagttatagaaaaggtcttgtgttgacatggccaagccccaagatcgaagcaacctgtattactaggttgtaactcagaagaaagttgcctcgaggagtttcttaaagctgtaacagactcagcctgagtgagaaataaacctttgtggtatcaagccactgagatggtggatgtgtttatttataacagcatgcccaggtttactctagctagtgcatccactgagaaaacaaggttctaagttgcatataagccctccagaatattttctggaccgttctcgcagaagagcaagtcatagaccacagcaatggtctgtaattaagaaggaaaagagaagagtgcagattgatcgtatttcatatcaaattgtgcttaaattatataaacaatcagttacataaatggaattgcaatggcaaatgttttgataatcaaagtctgtgccactggtcattcaaaatgtgtttctgtttctttaagtgcttacttgggggatgccagatgaattcgggggcttcttggagtgatttctcatcccagagatgtttttgtagctatactttggccctccaaatgttcacatttgatatacgccactcaaaaatagctaccaatggaaggcatgaccttgggctgacaatttatttaggaaccagcaaggccaggctgtcctatgtctttttaggttattctctgcgttgattccggtcaatagcctgttttaagaaaagcttaggccagatttaaaaaaaaagaaaatctgccttcccttgagtaaacacggtaacctgacagctccagtgggtaaataatgcactttttaaaagcctttccaaataggcctttatccagcaagctgcttttataagctaccactcttcctaatatctatttattcaaaacttcttaaaaaatgatagacatctattgaatctgaattttctggattttcttttttttttttaattttaaagaagaaatgtattttttcccttctggttagagaaaaagtttttcttgaaatatgatcctctcagataaataatggcaataaaagtaaatggaaagtgggaaagaacatggtttcttagtgcagtgtgcagcactttctaattggaaaaggctaaaagggagttttccttggaggcctcccatctgacttgagaccaagcaaaacagtgatttgcttatgagcattgaggtctctgtttcccttgttaaaagggaagctaagaatggaagaaatgtactaagttataaacctgtattatggcaatgatttgtgtggatatttcatacattatggtgagatatagaaattatagaatacaatgagcggtaaagacctttgaagtcaccactcaaccccaggtggaaaccgagtctctcactactgagtcttgctgaagatcacagccaccttcagcccacattttttactcttgctagcatagtactctgctcatgttgaaacactctatttttccacttaaaaagaaatctatccagcttagctgagtttttctggaattttaaggaatttatgcacctgtcacaggaaggtttgggtttgctgatggctttaaaagccagagctttggtagtttaggccctcctgaggtcctgaggtcctgttacctcatcagtcatcaaaaatggttattgttgctcttttcaagggtcttctcatttccttaataagaaataataattcagtaatgttttcataattactatgaaaatattgtattgtagataaaagcaagagcaagactggcctataacttaacagtagcagtatttctgcaagagtatgactgtcctgtgatttaacagtctcaccatttcctctgcctctctctttccttccctcccactcccattctcatttccttgctacttttgccttttcattttacatttttgttcatgtatgatatacatgcagataaagcacacagctcaagaaaacaacatgagcagcacccacaaaagcccactggggcagccataacaccatagatcgcttttcctgtttttcttttgatagaaatggaatcttctaatgtacagcttttgtgtctgacttctgtccctcacgcttatgctagtgagattcatctgttgtagcatgtattgttttttttttccattttaaaatccattccctccccatctggggtaaatttacctccatctttctgactggtactactcctcttctcctttgtgtcttagattttattgccctattctgacttattttctttgccgagtcagacatgtcatttggactagagcagtggagacagcacactgttcctgaaatgtgcaggtgaatacctctcctccaggatccacccaatggatacacctgcagctggccacatatgcaggcgatctatgatactatgaaaggccccgtctaaagtgcttttacaagagaggatgtcggcatctgtgatggttaattttatgtgtcaacttggctagggtatggtgcccagatatttggtcaaacgttattctagatgtttctgtgaagatttttttcgatgagattaacatttaaacaggcagactttgagtaaggcagattttcctccataatgggggtgggccttatccagtcacttgaagttcttaatagaaaaaagactgacctcacccaagcaagaaggaattctgccagcatattgcctttggatttaaactgcaatccttcttgggtttcctgcctaccaccctatcctgcagattttgcacttgctagcctctactgtcccatggaccaattccttcaaattaatctctcttttgtcctctctctacatatgcacatcctgttggttctatatctctgcagaactctgactaatacagcacttctacccactcccaagcccatggaagaccttgtttattggccaagacactctttccagatgagccttcagaatcctcctccactcagtcctccagatatccatggcctgtcaataagcaagttgaaacatccttgctatccttgcacgagagcaatggttctcaagagggagagggtgattttgcccgccaggggatgtttggcattgtccagagacatttctgttgtcacaaatgggggagagggagtgctgttggcttctagtgggaagagatcagagaagctgctaaacatcctataaggcacaggacagtctcccattaacaaagaattacccagccccaagtgtcagtagtacgaaggttgagaagcattgaattagagattcactcagactcaactattgaaagacaaacatctcttggatgagaggtatcttagtctctatcacagcaattctatatgatttagagagagctgcttctcagtaaataacctgagaaattattttgaaattctgacataatgtggatgtagcataaccttttattttaccctgtgtgtgtggagctattgcttttagccttgtcttctcttaattcctttcaaaattgagtctccttttacttttcatatacttgagcatggacactttctttctaacacaccaaaatctaggccacaaaatacttaccggagtcaacaaatccccttgaccaaacatgctatagatcatgcccaggacatgctacagatcctgggaaagaggagattggaggaaattgataaatggcagtttcctctgctctgccatcaacaataacaaaatgcgtcagaagagcagaataaagtagtcaatacggacttccctcactcctggcaaacaaagggctttctaacagaggttctcccagctcagcattcaccattggtttgggtaactgcataggaggtctccctaaagatgtgaagcatttagcacttggtagaggaaaccctgaccacgggcttgtgagatgaggcttatatctttcaaggatgtactgaaatgattgctacgagttttcataaaaactttcacctgctatattctctaaggcacagtacaaaaatgaagtcttcatagtagataatttgctggattaaaaaaacaaattttaagtacaatgtaagttaataatttaatgtattcatgacataggacaggcaatgtatgcagaaaagaggtgtaagttaggggagagtgtaaattaatgtttcattaatatggaattttactgtattttagagcacagtgttaatgcccaataaccagagtggaaagaaatgggtaattcttttcatagtgaaaaattttcataagaaaactatgtgaattttctctggagacactaaaggcagagagaaatgaaataagaataaatcatcttggaaattcattaatgttgctgcagaatatcagaaaaccaacatgagaaactgacacattccaattattataattacattggctgtattagagcagttctttaatcatgttgccaatgagaagaaagttgtttacttttcagtttggtagtttcagaactgtcagtgattagctaaataaataaatatgtaagcaaattaattttatctcttcctattatagttaagcagctggtcaattatcttcaataagttttctttctaaaagccacacataagaaaggaaggtcaacagatccagcattttggcttgaatttcaagacccggttggcagtatttcagatgtccttaagccttgatgaccaagatacctaatgaatgaagcatagcatagcagagctcttggttttgaatcacaattgcgttgcacgtggttcatgggaaaaaattaaaatatcattccctttttcccaacatatgcctaagaatgtcctaaaattgtgcagctgcttcgtgctccagtaatacacatgataataatggtgaaatgaagcataggtaggaaggtaagatgaagctgaagagacagaacaatgtgtctggatgttggattatctatggactcagctgatccatggactaagaaacaaacaatcaggaagtcacatcagaagatctcagcagatacacatgcatgtggttaaggcgaggtcgggatctgggctgccgcagatgcagttgagaagggctggccgtgctggttggcttctgctttttgtcatacaataccacagcttgaattaaactcatcttttgcagtgggtctgatgaaccttgcttattggcaaattggcataggctggcctgctcctgttgtattcaccatttccaggaagtcaacatgaaattcattagactgttttgcgtagccatgaagtgtgttcccacactagccagtgttatttccccaaaatgaccaacatgctctggtgacccaactgggagcagtgccctttgtcgtattaggtgcttcacgctttggattggcacagcactcccttgatagcctaatttcattcaagtgtatccctaaaattcatcaagtgagttaatgttgtggccaagatttgacttaaactctagaggagtcagatctggcttcagtttttcctcttcgacctccaacatgtccttgctcaggttacctaaccctgtgtctagttccctcatccattacagggcatgatactagaatattgattgagtacttagtgtgtgctgggtcctattgttagtaaatgcagtacgtcatctaattcttataacagcaaccctgcaagacaagtaccattatcacgccattttatagataaagaaacagaggtccagcaccccagtggaaagtggcagagcaggcactggtagccaggaggtctggccaaggcctgtgctctcacaagtgtctgacactgcccctctctaatttcagtaccgctttgcttctcaccaggaaattattttgactcacaccagcatctgcctcacagtattattctgaggaggagataagccagtgcacacagtgcacagctaacgaattcacatgtggattcggcaaatgttgatggatggccccttgtgtgtcaggcagcgttctaggtcctgagtatgtaagacgatcagagtgattgccctcctggagctcgtagcctagaaataagacagaccacagccagataaatatgtctttaataacacatcagtagtgccgcgaagcaaaagaaagcaggggcagaaagtgacagtgttgggggaggagagggagcccagatggataggggaacagaggatgcttccagtagagagaagaactctgtgaagacattacctttgagccaggccctgactgacagggaacgaagccatgtgaagatctgggggacattattttttatttgtataataaaattaattatgtactaatttcttagtttaaccacagagagttcttgtcctcctccccaaccaagggcataatttcttactctttctcaaaactctaacaacaagagaagaaaatctgaaaatgcagatggaaaagaaaaaaaaaaagctcttctgaaaggtaagaagaggctagttgccacgaactctggagctatcgtgaatggaaagagaacatttccatctcccattgatcactataattcacaaattctcctaaaaaacagaaaccacagttgactatggttttgttggtttcacttaattccctgacccctgactccttgtgtagctaaaagcatgtcataatcacggtaaattctacctctctttattccattagagggaacccaggccatttcaaacaccatcttcccatccaatcttgattttacaatgcttttcactgaagattagagttaatgcttttctaagaggtttgtcacaaaagggagcttaattggggctcattttttccatccgcccagttgttccataggcttacttttggaaagtgtgtctatcatgaatgattcatgttctacaggtgaggattatgagtttagagaaccaagtcacccaggaaagggaaagctaccttagcttctgggagatagaaccatagcactcagtgcagtgggttgaagagtgttcccctaaaagatgtgtacatgtcctcacctccgatgcctgtgaatgtgaccttgtttggaaatcaggtctttgaagatgtaattaaggtaaggagctcaggataaaatcatcctggattaggatgggctctgaacctaatcacaagcatccttcgaagagaaaggagagggaggtttgagacacagagacacaaatgataaagccatgtgaagacaaaggcagagatggagtcattcagcatcaagtcaaggattgccaatgaatgccaagcgatgccatgcaatgccaaggattgccagcagacaccagaagctcagagagatgcacgaaacagattctccccagagccttcaggagccaaccctgctgactcattgatttcagatctctggccttcacagttgtgacagagtaagtctctgttgtttgaagatagcaactttgtaacattttgatacagcagccctagggatctaatgcacttggtttgaatctttaacatgaaatgaaagaataatagttaagggtcatttaatttcttggagtagtgagggatgtgacccagtgccagataggaatgtaagtttttattgttttgttttgttttgttttgagatggagtctagctctgtcaccagggtggggtgcaatggcgcggtctcggctcattgcaacctctgcctccgcttcaagcaattctcctgcctcagcctcccgagtagctgggactacaggggcccgccaccgtgcctggctaatttttttttttttgcatttttagtatagacggggtttcaccaacctggccacgctggtcttgaactcctgacttcgtgatacacccacctcggcctcccaaagtgctgggattaggaatataaattttatatggagtttactgggagagaaaatggctgcagtggctactgtttgtgtttacatagtaccccatctgctttaacctctcttctagagacagacccaggtcacagtcacagagacccacagtctcagtgggaagctgagatcacaaccaaggctctacgttctcagtgggagcacagttggtgccggatgtggtccctcatgctgtggccaccattctgtgcattgcagggccaacagcgctcctgtccctgccactaaaatatcggtgcttggcccccagtcattgtgacagatgaaaacaccaagtattttccagtgtcccgtagggggagctgaatggccctggttgagagcactggcagatgaacctcagcattaacgtctctgggctacgatgccctgatggattcgtgatcacagtaaaaattacttactgatggcaaaactagaatgtgtggaaatctgctggatataacccagtttacctctgggaccctctatcattatggttaaaattaagattgaccaaatcccttctgactgaccattgtactccacgtgttgcgacattcaattatcttacaagcaaagctcactctctgatgacccagtccatctcctaagggtgactctgaagattctgtcacaatccctcatgttccaatgtacagcttcgctcttagagagtgatcttacttctaacttccttgaggatctctaatttttctggagtcagagaaatactggagaggcgagagatgagacttgaaatactggagaggcaagagatgagacttgaacctggagccaagaaccaggtcccagaggacttgctctgcactgtgccatgaattggcccttctttcacagccttgaggattcagagaaagatgcggatcagggtgccatgaatgggtacatgtggccatgaggagacaggattggaatctacaaagatctgccgggagtaagaggtagatgtaaagaccgagacaactggccaaggatgggaccaagatagtagcaatgaaaacaaaaggtagagaaaatagtcaaaggataacaaaaaggtagtcctgaaagcatgcagacccactggacatagagagtacaggagggaagagatcaaggatgtctcattaaattaaactttctagataatttaaattggaacacagctaaatttctttgatactttggagaggcttcctctaaacatcttgagtgtgtttaaagaacactcaagataactcatgttatctcatggtgagataacatcccaggcaatgatgcagattaagcaattcaggaatttaagggctccaaccattaactactttagaatatcagctaaggaacacattctggaagctttatgttctattatattaattatccccccaaggagcaaaaagcgttttaaaaattagttaaatgaatctcaatgttctttcctaaggcaaaaggtaaaaaacatatatcaacataaggaaagtgcacactttcagcagctaagaggcctcagtagcctacattacaagcctgcctccttgaagctcaaaattagtgaagccacacaaggtacaaggctaattcactatggatgaaataacgggcagagaaagtggaatggtaggctcttgagcacctaccataaagcatccaggtgaaataattgaaaggaagccctcttttttacactgcacacactgtgaaatgcgaggtgcggaaagttgattgtccttaatagggaagtatcagcttcctccctacagagagtttagaagaaagagaagcacagaactgcagagcttgccttctacctaaaaactggtgcttagaacaatggtctccagctgcatccatgttgctacaaagggcattttctttttcatggctgcgtagtattccgtggtgtgtgtatctatatagacatatatatcattattatataaagacataggtatcacgaatatacacatatatgtgatatgtgtgtgtgtgtgtgtgtatgtaacaatttctttatccaatctgccattgatgagcatctgtgttgattttatgtctgtgctattgtgaatagtattgtgataaacatatgagtggaggtgtctttttggtaggaagccattatcctaagtgaatcaacacagaaacaggaacccaaatgtcaactaaataccacatgttctcataagtgggagctgcacattgagaacaataaacactggagattccaaaaggtaggcggaagggtgggggaagtgttgaaaactaactattggacactgtttgctacctgagtgataggatcattagaaacccaaacttcagcattatgcagtatactcatgtagcaaacctgagcaagcactcacagaatctaacattaaaaatcaaataaaatacattaaaatgagaaaaaaatttaaaaattggtactgacatgtccagaatcttaggagaaagtagaaatttaaaaaataacaccacaaatatcagtgtttttaaagtttcaaacatttctgtatttaacaagtattggtgccttgaaattgagtttaaagaagacagttcttgatttatgctcttgtgggcattaggatggggaaaaaccccttcagagtaccatgacgagattttgaattatgcaaaggtaaagaaaaggtcccactaatgtagagatatttggagacttagttctaatgaactgaaagagaggtttgaggggagatgacttaggagtgaggagaggggaagcctagagaagcaggtgcagagcttctacccggatcctgggctggattcagcttccaatatgccttgtttgtccctgtagcattaggacatattgaaagcttcctcacttaagaatatggatattttacatagagaaattgattttacactccttttgcaaaccctgaaggtctggccatgccagtttctcattctcacaagtcagcaagagcaggtatggaggagagaatcagatgacctctccagctttctactttgtacatgaccttgtgagtatttctgcctaagagtcacttaagaatacagatattttacttagagaaattgattgtacactcttttgcaaaccctgaaggtctggccatgccaggctcttattctcacaagttaccaagaccaggtatggaggagagaatcaggtgacctctccagctggcctcggtgccacctcactgccacctccctgtggtcacacacagcctgctccactcattcacaggcctgggctggtttgcatttaccttggccccatggactagagagaagatgaccagctgtcaacatagctgttgagggacaatctctgggcactggcagaactacgagtgacctctgtgtccaaacagagaatgcctctggggaggagaccatttgtcccctacataatgagctccagtgtaaaatccagcatggctcaggtatgctgagcgttggaaactttggaagcttctggaaacagtaggctagaaatgagcactgacaactcaaaatgcgtacctgcaagggaagctgagtgagtttctccaagtgttgtcagggggatgcctgcggccacatggtagccagacagagaaaagaacagggaagacagcacacacggggaccacagaaaatactgtatgtgttctgggggtccgagtgggagtttaaaactgtcattcaggtgggaggcttaagttcttgaaatttaaatattagaataaaggcaatgcctggacataccagatgcatattaaaagttttctaaactatacatatttttaacctagaaattctacttttagtatttttatcctaaaaaagttcatggatgtgtatagagattgtattgaaatatattattttaatacaattatataaataatatatcataaaattatgcatgatatataatataaattataaaatgattattattgaataacaattatataagtataatgttaattgtaacttataatgacaaagaactggcaactcttaggatctgcaactgaagaacattgtttcaataaattgtaacatccatacaacaaatttcaagtagccactaaaatactaccaggaagttatttaaggttatttcaaagcatgttacaaaaataatatgcatggtataatgccatttttatttaatatataaacacacatagggaaatatttaagtttatacattatattagtttcctggggctcctggaaccattttctgcaaatattgtggcttaaaacaacagagttaattttctgacagttatgaggacaggagtttagcagtttcactgggccaaaatcaaagtatgggcagggctgcactctctctgaaggctctaggagataacccttccttgcctcttccagcttctgtggttctggcgtccttggcttgtagctgcatcactccaatctctgcctctgtctcttcgtgtgtctgatctcccttagtctctctcttataaggacccttgtgcttggatttaatacccaccaggaaaatccctcatgtcaaaatcattaacttcatcacatctgtaagtcgcttttacattgtaaggtcacatttataggtttcaaggactcagacctgttatttttggagcatcattatttcatctgctgttttcctaatcattaaaagatatgtttttcttatgtctttctgttctttcttagagtaagtattgggtaactttagtaagggggatttattttaagtagattataccagacaaagtatgaatttctactttgtacacgacctcgtatttctgcctaagagccaaaaaagaaataaacaaaagtaccaacatgaaaactgtattttccctttagagtattaaaaaccttgttcaatattcaagactttaaactatgtttaaaaaatagaggcatacgatatgattgatttttatcaaatactaggttggatattatagaacaaatatataatttagaaaaatccaagaaaaaaacagagatgaagatgccctaacagatgactctacctgccaaaaaaaggaggagagatgtgtataatgtgcaagaaaaaaagtatctatttgataggtaagtgtgctttcaaattctgaaaggtctttaatattaggaaaaagatttttaccaaaaatggaattttccactaaaaaacaggaactaaaataagtatccatttcaattctgaaaagtgaatgatgaagaaggcaagtcagaaattcattttagatgacgaatatgttacatttccaaaaagaaggtaagacactagaacagaggaaggtaaaagaggaagtccccacttgtttccttattacgtgttagtttctgagttagatgtaaggggagatatatgttttggacaggtttcttgtcctcaaaaatgtgtagttcagtaagaaagatatgattaagccgtgttgaggtgaagcgctatgcaaatgcaatcagtgacaagagaggcacaaaccagttcctccagaactgggggtggccaagcttccccttgaaatgcagggtttgcaggatagatgaagctgagtgaagaagacaggtgagtagtccatttctgaaaaaactggaaggaattgagatggaaaagtaataatgtaatacctaacatttatccagtcatatgccagatatggggctaagattttttttttttaatccattatcagggagaaaaaacgtttcctctattctcttaagtttggtaactgagagcctgtgaattaaactaacaaaagatagattaacagggggaagggtacacaatttttcttgatatttacatgcacaagagttcccagaaaaagagtgaaactcaaagaagcagactcaggggcttatacagccgttcaacaaagggaaaagagtttgggtctcaaggtatgataaatagtggggaagtgactaggaaatccagtgactcagggaagataagggttattttagtaaggtcgcttgtgcaaacacatgttggcatcaactccctttcttcaatgaaaagagtcactcttccctccttgtgtaggaggtgaggtcctcctcaaagagaaactaaaactgtatgccttgtctttaggctgttaatggtgggttgaggaactcttcctgcacctgctgattctcaactgcctttagccccaaataatctttatgccaaagtggcatagtttagagtggcatcttctgatccccatcacaataaacaggtgtaatactgatacgactatgagacaggcataattgttgcgtcttttcttaggtggggaaactgaggatcttatgtcctagccagcatgcctgacaaagaggtaggtgctcatgttgtcagaaaaggagggcaagtggtgttggtgtcgctcaggcaatttcaatatgacaaactggaaaacttctaaatgcaccgtcctcacttgtttcaagtttcagaggaaccaggtggatcccccattctttaactggttcctttttcctttcaagttcaaaaacactcaaggaatactttaataaatcaataaagtgaacacagcaagtgaggaatggcaagaaacaagagaaaatgttcaagaggaccgtaacgatgagaggaaattaaagtaagtttactcagatgctttcatgtaaccgcacttattaaaaaagaagaaaaaaagtcttataaagttgtataaaaatagagtagcagaataataatagccctaactataatttctgatactatgtagactggggaaaaacataacccaatagcctaaggagaaaagaaagaaaatatgtttgctcaaagaaaacaaacacagacatataaacctacacccctgatggctgaacttcatagaactaagaagtcaataggaagaaagtgcagacaagcaggaagctcattagattagaaatcaagttcatgttctagcactgatggccagctgaccagggcaattcacaagcagttcaagttcagggaccaaagcgcccctgagtgcctccattggattctgcacagccaaaaagacgcttgaaaacatcaagccctgtcaccagtaccttctataagccttgagagaggtgtgatgatataacagggaatcagagaagcctaaacctgtacctgctttgggaaacccatgtaatgccttcgcctgattcattattatttgagaacctacaaggcccctgtgttcacaactctaggaagatgcaagactctaggtatcatggctcttgcctttagaagcattttgctagttttctattgctctgtagcacgcttccacacactcagcagctttaaacaatccctttatctgttcacagctctgtagattagaagtctgtgactgggttctccatagtgtctcaggaggctgacattaaggtgttagccaactgggttttcctctggagactgggggaaaatctgttttcacacttattcagggtgttgtcagaattcatttctttgaggctgtaggacggacattcccactgcctttcttgttgtccgctgtgggccaccctcagcctgtagaggccacccacattccttactacacagccccctccatttctaaaacaagcaatcaagaagtctccctcatgttgaatgtctgtcacgctgtgaatctctctcatgaggaagatcccagcagctgatctgagacctgaattacatctacagaatcccttgacaggagcggctagatatgtgctgggccacacaccagcaggcagaaatcgtgggagccgtattgaaattctgcttgccataagcatcggaaaactatttactaagtgttgaataaatgagaaaagaaatgaaaacttctggcccctcactggaattatctcctcaagtgagaggcagcatagctttgctgtaatcctgtccatcacctgcaaagagcccgtcctcatgttaatcacctgttcgttgctcacggcaactctgtaaggcaagtccaagggcaaggcttatgattcctgctctccagaactctgatcccttaacttcttgcccagtgctcttttcacgacaagaaattacagtttctttaaggttaccttggacaaactctttggtgacattgtaacaacatgaagaagagacacaggagagcatggaaccccgcagaagacccatgaaccagggccgcttggggctgtgggcactggctcctctgctgtaactgagtccttgccaagaacccacttctgtgatctggcaaggggcgggagacctcagcagaagatttaaaaccagatgaatcatatcactggtagtcacacagtgggcagttgtcactggtgaaatgactccgtaggtggccgcagcccaattatctgctaggtatggaggttgcatcccaaatcctgtatggagcggcagtcctaaaatgagtggctggtcctttgccattttcccgtcgcttgaagctgattgaggcatcagtgaacgaggaggagggtgggaaagcagagccttccagggtccaagtctgagcattgatgggggaggctgggctgggtgacagaatcttgatggcagacctcagtatcacaaagggtaaggtgcttggaggtgaaatggcctgaagtgggaaaagaggcagatgctgagaggaggagagtccatgcaaaactgacaggggctcttctgatgggtctcactgctccaggaatcctggtcttcatgctttctaggcatcctgttgagtcctgaaagaggagcccagaccaaccaggagctcattcaccctggtttgagtctgggtacctctatctcttaaccagctgggcactcttggcttagctacttaacatctagtgccttgttttcctcatcagttgaatgctggaagttgagctctctgatttatggagccccttctggctatacattcttatctcatgaggacattttgtgatctggactatattaaagagccactctctaggattaataacagtacacagcagccttttcatattcttttctttttctacagttactgcccaatcagcactataaaatattcaaatcttaaaaaataattcattgaatatgtcttcttttagcaccagctgtaacaaaactacatacatcagtagttagctgcttgcatgtgaagcaacagctacatgcacatgggaataagctacaaaatgttattttaataagatgctgtccacccaaacaaactgaatttgaaatgtggcaccaaacttgctatctggctcattcaaaaatatttcatggtcaaccatgtaaatgataaccttcaaaaaacatttatgaagtaatcaacatgggaagacagaaagtcaggctagaactttattacctgtgttttgttggaggtatctaactgttcatagttcactgtgaattctttggattagatagttctttggaagaggaagatagtcctctcccaaacagatagtcctttggaagaggaatctttggaaggtgatttgtcacattatttgaaaagagcattgtggctgattcagagccgccatttccttaggtatcagctgaatgaatgacatttttcagcttaatcaggctaaaactcttggagtcatctttgactcttttcttcaacttcctgcattcttcttggcgctgtcttcaaaagataaccacaatccaaccacctctcaccacctcctgctccagccatggtctgagccaacaaggtctctccctgatgagcatgagcccccaaaaagttctccctgcctctaatttggctcctcacggtctattcccaacacatcagctacagtgttgatcacttatgtcggttcatgtcactcttctgcccagatcctttggtggttctttttacacagaatagcagtcaaagtttatagagagtccctcatttcctctacaaccttctctgtcctctctcccactggacaccagttgagcctgtgcagtccagccaagctcctgggtgctggggtgtcccctcatcttggaatgctcttctctgatgctctcttggccaactacttcaccccttcaagtgtttgctccaatttcatctttattaaatttgcatagatttagggggtacagtgaaggttagttcatggatatattgcttagtggagaagtctgggctttctgtgtagccatcccctaaagagtgtacaataaatgtccattgtacccattgagtaacttatcatccctcacccccctctcagcccctcacctttctgagtccccaatgtctattattccactctctttgtcatctctgtaaggcttcacctgatctttctgtgtaatactgcaacttgtccctcaccccccagaaacccaaaccctccttatcctgatcttctcttgttcatagcatttagcaacttcagtatgatgcattcagtgataatgaatgtttaatttctatctcctgctagaatgcaagctctatgagggaagggatctatgttttgttttctgatgcatcctaaacacctagaagaatgccagataaatgaaagcatccaaatgaaatttcatctcacactcatgtcggttgaaaaagtcaaattgaacaataaatcttgattgactacgataaactaaaatgtgttcatttaggcttttttctatgattcatcttctaaattgcctggcaatgatcgaggaatgccctcagtcaagaaaatgggattttagctaatctctgaaatacatttgtaccgattgcatcaaaaatgcacatatgctacctctcacattttaaaaatatagtagcctcccgatcaccagataagcactttatagaccacaatgatcccttacctcttccctaaaatttagatgtaaaaatattttggatacaacccatatactactacaatttaaggctacctcactgattcgtcccaattctagaagaaacagacgacccattcaaactaagatgatctaaggatgaaatgggatgggccaagtatatttctcaaaggagaaacacagcttgcttcgagtgactccacagaatgggagctgaagaaatgaagcctgacttcactttccaccccctctccatttcctgctgggcccaactgaggactagataacaggaaggccctttgaggcagtcctcagagattatccccctagggcagagagcagcatggagaaggatggagaagcaggctgcaggggcaagggaagataagcacccaaaaaaagctctgatctatagtaagggactatgtgtatcaaccctacaggtggatttcagaattttaaatacattttccattgcaacacagtggacatatacttaagtgtttttaataatccacttctaaaaaccgccacttgccacttgcaaaaagcaaacgaataaaaattcccattctattctattctattctattctattctattctattctattctattctattctattctattctattctattctattctattctattctttatctttctatgctggttgcaacccattaaactgatttcacaacccacagtttaaacatctctggctaaggccaatccctccatttaaaagataagatcacttagatcttacagggttaactggcttgtccaaatttaaagtatatgtaatcattggaatgacgtgggtgtgtacactcattgtaaagaaaaaacttatttcatctatccaaatgttctcttccaaaccacatgcatatcagcatgttttgaaaggattttagtattgtaggtgtcaagaaagcctctatttaaccatcagtaaaataaatagtcctcaccatactgtgaaagggggacaacttcagtacagtggagagctgaggtcatgccctcccatacaggaagagctctttggaatcgagggctcacttattcaggaaggatgacctcctgtgtgtatgtctttcacccccaggtaacacaggtatttatgatgcctcatgaagcatacttgctggacactaggatggtggctaatgacagtttctctgtgcaacaaggtagagaactatgagacagccaaggtcccagcctggcatatacattgcacagtcgcacaggaaggcactctgctctgaaatatttcatcctggagaagttggctttgatgactttcaaaagtagcagaactcactggttctctctttggcaggagtttgtgcatttcactcatttcaagtcaggactaatagttctaatgattttgaagggaacctaaatgattcctttatgcctggctgggattggccagggttccacttacaacccacaacatgctcacacattccatagaaaaataaatactgctgtaaccacgttggtgccacgccagtgcaaatggccattttcttaagtactcattttaaaagcaactttgttatttcagcatgtgctttgaaagctggcttttctatctctggtgtgatgttttcattgtagggacaaaagtaaaacattaactctttcaacagtttgagggagggtggatatttaatacaaaaaccaaaaaaaaaaaaacgtaatgggggaaaatgcatcactcctgctttcttggatctctgctggagtttccacttgtgtgtgactccttcaccttccaccaaccacccctttggttagactgggttgtggttccttcaaacgtcttgccgaaacttctggacagctatcaactgaagaactctgtcctggtcagaagcttcaacatcctccgcccgtgatgcttttctgggtccaacgaccctgcaataattttcttcctgtgtaccagagtttacgaagtcctcctgcatgtgaggccctgggcgcaggtgtgggcatgtgcaggtgtgttcatgtcaactgcagagatcctgagggcaagacgaagaaaacacagccagtcctttcaggaatttataattcagatgctgaggtggaacagaacagatgaaaagcaaaagcacaatggagggcagttatgattaaatggatttcagagggtcatgatggtgccaggctatcttgggtctcctcacactcaacatcaggcccctccacctcctgctgactttcatgcatcaatgttaggctaacatgagagatgcttacaaatttgcttcatgatcactgtagaaatgagcatggttgttagcaacagctgctgtgggtgtgcaggtcatggcgtctctcagagctgggaatgcccaatgaatgcactcccctctttcacctgaccacggatggtcacctgatggtatttggaaagtaatgagagatctttccaccacgacgttttgtgagaaatggtgtatttactttttcaaatgttattgtttaatcttcgaacagctttagatttacagggaagttgaaaagacggtataaagagttcctataggttccatattcagtttccctagtgttaacatcttacattgctatgtacatgtgttacagctaatgaaccaatattaatacactatcgtaagtggaagtccatacttcacatttccctggagttacctcttgtcctttttctggcatcccctcaggacaccacttcacattcagtcatcacatctccttaagctcctcttggccgtgatgccatgacagtttcctagaccctgtactaagtttcctagactgagtactggtcagatattttgtaaaatgcctgtcaatttagatttgtccaatctttattcttgtagctagactagatgatgtatacacatttgggaatgtaagcataaatgtttcctacataggccaaacgtgttgttttgaaagctatgtatgctctatgaagtttgggcactgaaaaccaatagatgctccacagggaacacgttgattacatgggacatgttcatgcaaagagtgactcacagtaaattacactgcatgtggtttctcagactcagatggaaagcagacttcagttaccctaggtacatctcaaagtttccctgtttcagtacactaaataaataagcatagtgttagctgtatatattgttcagttataggttagttatctgctgtaattaacaacctaaaacattcagtgacttaataaaatgaaaatgtatttctctctcataccataaacacaggatttctaggtgggggtattctctttacagtggtgtcatggcattccagctttttctaaacctattatctcccaaagctttctggtgctcatttgtattagttaggggacaagagaataaagcaggcatgaagagctcagttggagatttttcaggtcagatctagaagtggcatgaattacttctgcccatgtttcattggccagtactcagtcacctgacccaccctgttgcaagagagactgggaaatgtggtctagctattgtaggagaaggagaaagaaagagactttgtgaacacatagcagcctctgccactctatgaatttatgtcataccaagtttccagaagattaaaaacatgataaaatgacttggaagatgcatgctattcttttcgcacacataccccctgtttagatttggtagtcttctctaaggatgctgcagagggtagcctctacataggcacttccacaacactggtatttctttaaaagcaaaagtctgtcctttaaagcaatgtagagggagaaggataaagaggtagaaactggggagaattatcccagcaaacaaaatatgccttgcaccaaatatatttacaattattaaaccagatgattagaagtaatagcttatcacctccaccaatgggaacatggaccaaccaaccggagactcataaaaggaaggggaacatgaaagcataatctcaatccagagtcaaattccaatatatacctttctagagaaaaatgaacagtctttctttctcaaataagactactctttcattttctaaataaccttcctcaatctgagctatagtatgtctggatgctaattgtctagtagtctagacagtgatgatattatgaccaagttatgcacagataatcactgtgtcactgtttccaaagctgcctacacgtattgcttcactggacacacttggcatgtgtgattattctcctgatatttattttcaccatgtaagtagagaatgcttacttaatcaaaccatccagtgaactgagcagtttttttataattcaaatgcaatatgagagtcttgaagctaagaaaaaaattatgttaatgtagcccatacttttctgtattctggggcaaggaaccctgtggcattttgctcgcttcattcgctagggatgcatcttgcccaggtccctccagtattacctctgcaaatcattcctacccagatgggttggcttaaccaaaaccattctgatcaaggagttccaggaatctctccggagaggtcttttctgcagcctggtccaatgcacaggttacaataaagtggatgactatatggttctctggctttttcaaaatgacacatttgtttttaaaaaccaccatcttaacgaagcatatgggcaacgatgtcatgacacccttaaccccacccgaaggagggagactgaaatcaatgcagaaatgaaaaacagtatggtttggaaagtaggaggatgttccagacgcagtggataacaaagtttatttctggcaaggaaagagaaaatgatcaaagggatctggaagaagtttgtttggccaaggaaaaggcatagacgggagtaacaggcagacaatcgagcttggcaagagggtgggtgttgatacagcatgcctttaaggacagctccaaggctctagtgtgcgttttatatactatttccactattataatgacccctggagtcactgtattgcctaaggagactcgttaaatcgcagtctgtggctggaggggtaacaaatggaatcttccctcactcctgtgataccagtctccttggtctctcaccagacacggaaatgacacacaacacatgaatttaaaattcacctgtgcagcttctaagctcaggcgtcttccagaactggtgaagcaggcccaaaggggaaggcggtcaggtagggagactggaagaggattttatgaacctactggaaggtgtgggtgcagttcaccagtaagaagtttgctttgctttataattccgagtaaagccagttcttcccaaaggtggtgggttgaattgtggccacctctagaagatatgtggcctcagagcctgtgaatgtgaccttatttggaagaagaaactgtgcacatgtaattaagttaacgatatcaagataacgtcatcctggatttagggtgggccctaaatccaatgctaggtgtccttataagaagatgacagagagagatttgacatgcagagattcagggatatgtgacatgggaggcagagaacagggtgatgcagcttcaagccaaagtatggcaatgattgccaacagccacccaaagccaggatgaggcaaggaatagattcttcagcacctccagaaggaaacaactggcacctggattttggtgatctccagaactgtaagaaaactaacttctgttgttagaagccaccaaatgcatagtaatttattacagaaccagagctagaaaactaatacaccaaacaagaaacactgaatcatgatcctatccctgtgctcatcccgccctttactcagagtattttaattgtagtaaaatatatataacataaaactcaccatcttggctattttaaagcctacagttcagtggcattaagtctactaactgctgtacaaccatcactaccatccatctccagaactttatcatcttcccaaacagaaactttgtccccatgaaacactaactccccactttccttcccctcagcccctgggcatccacggttctattttctgtcttataaatctgactaatctaggtgcctcataaaagtggtgcattcagtatttgtccttgtgcatctggcttcttctttccacttgggcaacgtgtcctcaaggctcagccatgtggtaacatgtgccagcacttcattcctttctatggctgaataatactccattgtatggatagaccacattttacttatccattcctctgtcagccaatgctagggttccttccatcttttggctcttatggataatgctgctgtaacacaggtatacagatatctcctcattctcaaaatatttattgttgacatctcttgaactgcttcatctcttccttccctctagctggaatgatccctggtccaggttccctcttatcttcctaaaacctccaccctttcaccgatttttatactttccaccctcagcaatgcccttttcaggatagctcttggcagtgaggactgcagagtgtcggtgtcaatatttaagtgggatttggggacagaagccaatggctggtggaggcaggcagtgagcaggggctaggggattttgttgatgatgaatttacacagcaaacacaatgtttctgctaataaatgaaattacagatcaataaaaatagctaagtcttttaaagggggctagtcctcacattttatataagaccctgccatggtttggctgcgtccccacccaaatctcatcttgaattgtagctatcatgactcccatgtgttgttggagggatgtggtgggagataattgaatcatggggtggtttcccccatactattctcatggtagtaagtctcacgagatctgatgtttttgtataaggggtctccccttttgcttggctctcattttctctcctgtcaccctgtgaagagatgccttccgccatgattgtgagacctccccagccatatggaactatgagtccattaaatttcttgttctttataattacccactcttgggtatgtctttattagcagtgtgaaaacagactaaaacagacccagaaagcatcaactgcccatgtcaaagactattaccactacctttcctgaaggaggcctgagtggtcttacagtgttacaagaggcttaagcttgatgcttcccctccatccatcatgtgtatcccaagtcaaagataaccatacaatgtatcatccaataaatgaggatacttttgagagtgagagtggagaggtgtacagttatccccaaagacaactagcccaaactggggattgtctgggcaaagagatgtgtgctcacctgccaaggctcacttctacacctcaccccgagacccttgtccctgcctgaaggactcatgcagcatttaggtttcctcaacctgggaattcacaaataggataccatatctccaaacatgtatttagtgacataaaatcccaagctattaagtaacatgagataaacattgtgcccaagctaaggatgtataatgtgaaatgtactctaattatgcattcttcctggctttttcctatgaaaatgacagaaatagctaatgtgagtcaacatacctataaaaaataatattgttcattatattacttgtcaagaatcaaaaattgttttattagcctattgtatgttcttctccttgtggcatttttattttgggagaaactagtttttgctggcctgaggaacaatctcacacaaatagtacgagtattctctgctaggaatagcaaacacttacctctgaaggggaaaaattctagcttctatttatttatatttgttttttcccctcaacaattgctgttctctataatttaaatgtctgcaaaaatagtagttatataaacattaatgcattaaaagctatcatttcaatgtagcgtgcaaatcctggaagctgaacattaaggaatcatgagattttccctctaagcaaggggagggacttcgcaatctttttatccctaaaatgtatcctttgaagcttctcaagttcacattgttaagcgggcctgaattatcatcagcattgcattttagtaaatgctcattttccatctgcctctgatcagatgcacctttccttacctgtgacagacttgattcttttatttctatattttatttcagtgttaagtataggatttttctttccctttaaacaccaatatttctttttctaaccataatataatacatacatgtaacccagcaagcctggatttgaaaaaaatcactcaattatctcattggctttcataaaatcatagctatgtgtccacagtggggaaaaaaacctcccaggaaagctcattaaattatgataagactgatataattccaaaggatgttggcccaacagaagaaaaagacaactggagatgtaggggttggggtggtaaggaaattgcaaaagccaacgaacagctaagattggtacctgtgagcatcaggacccccacctggagcagagatctctcatatgtctgcctgaatctagaattagcaacagctcacaggctggccttgcactgaagaatgaaatttcagggatttcctccctgaaatccttggacttacatgaaacttcaaatctttaggatggggtcttctgagacttccaaatgctctcatctcctattccccaagagctgcaatgcatttaaggaactttttacctcctgcatagtaagcccttgaacccatgtgactgaacccacggcccttgtaactataacaattatagtaaccattcatgctacctgcattcattgagctcctaccatgtgtaagacactgtgctggacacaatcctttacatgttgaagacatggcaacaataaccagagaacctaaggatagaggggagagtgaggcagcatgtggaatgagtggcagggagggctagttttgctcagagaggtggaaagagcttcgtagaaaagctaccctttgagttggaccttaaaggatgagcaacaaagcagctggcatagaaggcaagtaggcaaaggaatgtggaagaacatgccacccatcctgatggaaagcctgaaggtctaatccttgaactactcaaagacaaggaaatactctttagagcctggagctaagggtgcagtgaacaggcagaaacgtaactgatcccaggaaagataggttggagtaagcaaatggtaatttagatattttgcaaataaattaaatacttttttaaaaagattcttccctcttggaagtatttagaaaggaatgtttagtggtataaaagagatggctaattattcttgtgagtgttgagggtgttatgtctccccaaaattctgatgttgaaatcctaacccccagtgtgatggtatttggagacagggccttgggagataatttgtgttagatgagatcataaggatggggctcccataaagggatgaatgcccttgtaagaagagacgctgtaggatgtgctctccctctttttctttctaacatgaggacacagcaagaaggtggctgtctacaagacaggaaaagagccctcaccaggaactgattctgccagtgccttgatcttcaacatcccagcctctggaactgtgagaaaatttttgttgtttcagctacccaatatacaatattttgtccatggcagctcgagcagactaagacagtagcactattttgttaaccatattttgaaattgataatagtgattttgtactgacaatgtggggaggaaagttgctaaacagctataatatttcaacaatgaaacaacagcttttctgaaaatcataggataggagatcatattgcttgatagcttggaaaaccatttacaggaagaataaacttactaaaagaggacaccaatttttgtttaactataaagtagatgcttgagacatgtggctaaataaatggaccaaaatatataaagaaacaatgacccatatttcttagaacatagctgtaattttccaatagacagtaaaagggaagtgatgacacttcactcagtattgggttgaatcatattaaaagtaacattttggtaggcaaagctgatctcataaaagcagtttcatatggtttaagataatactaaatagtgacgttgcagtaattaattcttaacatatgagttttatgtaatttatcacgttatagtgttagaaaaataagttcttaactgaacacaaattagtacttaaagtagcttcttagaatttgtttgcttaagactgtgataaaccagatcactagtaataaaactgataattatgaaattaacaatttgatctttggctatattttagggaatactttctcataaaagataattaagtattagttgaaataaagtatttaatttcaaggttattgctttgtaattgatttccttttaagaggaaagtaaactcaatttatattaaaagtagacaattgtatttttatgccccttgaaaaaaaaattgttgttttaaataaccacaggatcattaagttacatcctttgtggaagaagggtcccaggccaggattttaaaactctatgtactggctgtcttttaatacaagatattttgggaatgtattttcatttttcccacaaaatattatttatttctctaactgaaaatttataaaagctacactttccttggtatattgggagactaaggccctgagccaatcaaatctaattctgtgcgtaagagaatattttaaatacacataccctggcatgaacacacacatgcacacatacacacacacagacacactcagtagcaacaacaaatagcatgccctgatagccctttttctgaacaggaaaaaaaaaagaaaacctttcctattaacaaataacactaatttaactgcagtgttttctgtaagaatttctttttttttaattattttaaatattttatttttaaataggtaatatgtgcatgtggggaaaaaaaagttaaaggcacaagagaataaatggtaaaagttgaatctctcaccctcaagtctcccagttcctttctccagagttaactcctgtgaactttttttgaaaatcatcccagacatatttgatgacagctgaacagctattacagcacagcccagcagaaagaaaatgcaatccacgaaaatgcaatccacgtaagcaagtgaaaattttctagtagctatattttaaaagtaaaaagaaacaagtaaaattaaatgtaatattttattttatttaaactaatagaggcaagatgttatcttgaaatgtaagcaagaccaaaatattaatgagatattttacattctttttctctactaagattttgaaatcctacatgtagtttatactcagagtacatctcaattcagaccagccacatttcaatgtaaaaagtggtcactgtagtagacagcatggttctataaagttctataaagtataagaatctttaaaaagaaaaaaagtacaaagaatctctttaaaaatcctttcatacaaaatacattgttcttcatgttcttactgttccaaacattgttagagtcatatacctataagttcacatattataaaaagatagaaaatacagagaaaaagttttaatcacctatagtcctgttttagtacaaagctagttctgaacctcaaggaataagtatataatataaatacatttcagtcaaaaacgcataggtctttagtaagttgtgtacactaaacatgcacagcatttgtatgttaattagacctcaataaagtggttggttttttttctttaaaaaaatgaaataattaaaaccaccatttcccaagcaaaagcaaacaaccccaaaactcctaagtctaagaatgctgcccaagatatcattcagttaaaattattattgtgaagtaagggacttcactaaccaataatacatgtgtatatttttgtttgaaatgtgaaatcaatctctctctctctctctctctctctctctctctctctctctctctctttctctctttctctctctcttctcttgcaaagagagggccaatggcgggtatcgtcaacagctgttttggggtttggatttattgttttattctgcttggggtgggggccctgtagtacatttgactgaacaaacagcacgccttgctttgaaacaagggtgagcaggcttattctttgcctggagccagtttgtgccttcatacagctgtgtttggatatgtagatatggtacagaaatttggaaaattaccacgtgaaattattgtttatcttttcttctcaggggaacaaagttttgaataagcttttcattgacgaataaaaatctcagtgtctagttaactacaaagtatgcaatataaaatcatgtgattctgtgccatggaaagaacaccaggcctggattcaggaatgttccgtgtcagtcctcactctcacctggggcaaacttctagtgggacctctaggagcccactcagccggctgggccccatctccctgttccctggattaggaggcgggaccagggatttgtataacaatcctacaattcttcttgccatagatccgtgcaatgttttcaaaactttcctttcaaaataatgattctaaatcctagttacaagaaaatgtgttattcacaaaagtactattggataaaatttttctaacatctccttatggtttacagcaggtattggcaaactgcagcctccagagctaactgtttctgtatggccgttgagctaataatagtttttatatttttaaatggttggaaaaaatcggaagaagaagatgtcatgacacatgaaaattatatgaaattctaatgttagtgtcaataaagttttactgaaagccagctacacttattcatcgatgtattaacagtactgagtggttgcaacagagactaaaatatttaccgtgtgaccctgtacagaaaaagtttgttgcctcttgatttacagtgtttgaaaacaaatggtaatctgcagaaagaataggtaacttatagtaaggcacttagaatatgacaggtactgtactaagtgatgtgggtgatttttaaaaatatgaccatcttatgaagtaggtaggagtatcagccccaatttcgtgcatgaggaaattcaggcttgcccatgtcaggtaccctcaggcttgccacattgcaaaaaagtggcagaacctgaatttcactccaggtcaagctgcagagcccttgtcttctacctctgctccagaccatggaccttcctccacctttcactcaaaagacagagctgttttggcaatgcagaaaggaccaatctgcttcggaactccctgccaacaaaagtattggtgtctttaggactattaaaaagaacttaaaatgatatatttcacataaatccatccatctacagaatgtgtaacaacgcaaaagaagaaagttaaagttgtatcttcaaaatgcattgcaatatttcagaagctgagtgtcctactcagtgttaccaaagtgccaactaatgggctgctaccattcctgatcaaattgtcactgatacaaagtaaaataataaaaagaataaagacagtgtacttagtttttcatggaactaactattcagcttaaagatagtcctgtattgtgagattatatcctttcaaatttttggtgtaaaatatagtctccattatgaataatcatgccatacctcaggcttttttctttagtgtacttgcttgacaaaagtaaagcataaacaacactattttgggcctttatttgttttattttatttggaaatgtcttggtctgtggaatcctaaagtctgggaacctctggtttgaatgtcttttgacccagtaattcaatttctaggaaattatcctctggaaataatatgtggcataaaaaacaatctataagcaaaaacatacactgcaccattatttgcaaacagcaaaatttcaaaataagattgtgcaatcctcaaattatgatatagtcatgtaataaaataacatgtggccattacaagtcttttgtgtaatgtatctagtgccatggaaaatgctcacaatataatgctaaggggttaaaaaaagcaacacaattctatgataaaatatgattgcaactatgaaaattaaatgtataatcataatatcttattaaatgtctaaatgtaggcacagttacggttttttttttcagatcaagaatgtttttttcaacttcttttccaatcagtctgggctttttttataagcagccataattgcaggtgaaatctgttttgtttttgttttttttttttggtgcttttgccttctgttttttctcccattattctcatctttttgtcttttacttctgtgtcctgggagagctctaaatgttgatgctattgtctgtggtgtccattccgcagccaaggtgaggaatgaagcctttgattctatttgacatttggtttctttttgatccttcttcttccaatcatcattgtcatctcttcacagtttctgcagctgttccagagagatcatatatatttgcatgcttattgtcaaattattttcttcttgttaccttggtaaataatgtttagaaggcttccactgaatggcattcctcagaaggacatttctttcctcttgacctagagcaatttttagtaggctgtgtttgatcttgtttattcttaattcaagagacatctcagcagatccagtatttgccgacaggggaggtggcctcctgttcctctcctttctccctgcctgcatggggatggtccaacccctctcagacccatagctggagagttggtggacttcaagatccctcccagtgttccgcagtgtgcatccactggactgaggcagggttttccccaataccttcggggtttctgccactgtgaacaaatagggacaacaagctccccaggctgtaggattgtgaggcctcttagcatcccttctgaacctccaccacccatccccactgttatggtcaaattatatccgcagaaattcttactgaagtcctaacttccaggacctcagaatgtgaccttgtttgggaatagagtgttacagttgtaattttgttaagatgaggtcatcatggagtagggtgggcccctgatcaggtataactggtatccttatgaaaaggggaaatttgggcacagaaacccacacgaggagaatgtcatgcgaagacacaggcagggatgggggtgatgcctttccacaccaaggaagtccaaggacggcctacaaccactaaaacccaggggagaagcatggcacggtttctcacaacctgaagaagaaaccaacgctgccagcaccttgatcttggacttcgggcctcaagaactgtgagataataaacgtctgttctttaagctgcccagtttgtggtgctttgttacagcatctctcacaatctgatacaccttgccctgctaaaggataagaactcatctcttctggctccattcaagtcaactagtgctcaagtgacattagagttgtctcatggttcttcacacacactgtgttgtttctctatcgaggaagtttcccctgcctggaatctccccctcattcccaccctaatgccccatacatacaacctaccaacccacccttgccacctacccttacccactcacttttaccaacctatcttacccacccacccttgccaacctatctcttacctccaagccccttcaagcccacctccttttttttttttttttttttttttttttgagacgaagtctagctctgtcgccaggctggagtgcaatggcacgatctcagctcactgcaacctccgcctcctgtgttcaagtgattctcctgcctcagcctcccaagtagctgggattacagacacacaccgccatgcccagctaatttttgtatttttaatagagactttggccaagatggtctcgatctcctgacctcgtgatctgcccacctcagcctcccaaagtgctgggattacaggcgtgagccaccatgcccagccccaagcccttcttgacttgaagactgagttcagaagtccagactgatctcctccagaaagccttttctgggttagatggcctttctagggtgacaaactatcgtggtttgtctggaactgagggggtttctgggatgcaggattttccattctaaataaaaccaagaaagtcttaggcaaatggggacaaattagctgccccatctttctcaatcttcctgtaactccttgcacatatctttctaaaactgttcttcctaaatgtataataggatgatctgatttgtattaggataatctggtttgatcagactcacactagaccaggagctccttcagaacaatatattttcctacctgtatctcaacccttcctacatagtaggtgcttacttaatatctttactttttcttttttgagatggagtttcgctcttgttgcccaggctggggtgcaacggttcaatctcggctcattgcaacttctgccccctgggttcaagcgattctcctgcctcagcctcccaagtagctgggattacaggtgctcaccaccatgcccagccgattttttgtatttttagtagagatggaatttcaccatgttggccaggctggtctcgaactcctgacctcaggtgatccaaatgaatgaatgataagagcactgccaaatctcttcagggttacctttgcataaatgcctccatctactccacattcattcctggacagctacattctgggtactttgctccaattaatagctttcacgtcctctcaacttaggaaccagaggcctcaaagtgacattactctagaactgttgtatgtaatacccactgtatttcacaaacacaccaaaagtaaaccataactgctcagcatgctaacaaagtagttttccaagaatcaaaatttgacattcatcaagtctcttggaaaaataaatttcacctgaaagtggtttggttgttgcttttttaaaaatacagccttcatatcagaagctgctataagtcccccttcttaattgatagcatataaatagaaaagtgatccatttaaagaatactaaaaaaattctttcgaatccttcctaaaaaaatgattcaagagcatcttggagtaactctgtattaagtgaatagtgtcaatctacttctcacagctttttgaaaacaatgagatatctgctcagaaaaatattattctgataaatttttaaaaatatattctggattatataaattatatatgtttaatgtttttgtttgtttgagacagagtctcactctgttgcccaggctggaatgcttggcacaatcttagctcactgcaacctccgcctcccaggttcaagcaatcctcctgcctcagcctcccaagtagctcggattacaggtgcccaccaccacacccaactaatttttgtatttctagtagaaacggagcttcactatgttggacaggctggtctcaaactcctgacctcaagtgatccactggccttggcctaccaaagtgctgggattacaggcatgagccaccatgcttggcctgtttaatttttaaaataagaaaatattaatgattagaaagaaaggaaagaaaaactaacccacaattataccactcttaacacagttaaatggacatctttacaatatataactataattatccaaaaggatattaatatctatagtatttactgtataaaaaaacagttttcattattattaacaattctgtaaggaatatcatgttaaccaaatatttgtgtatatccttatccgttcccttagaataaatccttaaaagtgggattttcaggtcaagttatattttgaaattcttttgttttaaatgtttcatatgtttttcctagtcatatatttttgatgtcaatgaaaatatttattagctatgatcattgtgtatggacttgtatggctatttttcattcttttctaatttttacaattcaatgagaaagataattttattgtagatcaagaatctttttgatgacaaaatgtttacttttacctaaaagagaattatgatgaagttattgcatcttaagttaggtataaaaattatctctatatttacactgcttaggagaaaagtaatttgaaaatgtagggtggagatgagtgagttaaatgtaccaacagtattttagctgtctcactgcagagacattccaaaatcttgcagcacaagaaatactttgaaagtcggccttaaacttaatcccataggagtggggcttggcaaacaagtcagcatctttcttgtaaccctaagaagttcacagattccagtaagcttccatgcattttgcaatccagattctactccatgaatctttcgagtttatgaaatttcctaatacatcctacaaacgctctcactgccgtctgtctctcaatcatagaagtaccatatcaatttatagtctccaaaagtcaataaagcctcccctcccccaagtaatggggagaaggatctggaatcactttatgaagtgtacttaataataatatgacaacaacatgccacgttatcacagctcaaactaagctgagacagcctggtcagtacttggctatctttgaaacaaaatcacattcttcaggaagtggtgttggtaactcaataagcagcagctgttcctgggtctttgaaaaaaatgtttcatcatttgaccagtattcagtatccagcattatgtcccattataactgatggccaacatggaaaacctctgggcaaataaatacatgaaaataaaaattgctcttaatctgaggatcccatctcaatttaaatgtactctgttcacatcaatttctctgtaatgttaatttgcacttattacccagaaattccatacacataaaatgattgcttcattccttccaatctttataatgagcactccatccctgtgccatttaaaagctttctaaagacccttttaaaaggaaaggtgatatcactgaatgtaatgtttatttacaagacagtatgatcccaggcttccagatgctcggtataaataagaacccagaaacatgcgctgcatttaatagaaatttgagcccatcaattttacatgatcctaccaagaagagtgtagaatgctaatgatgctaatgagaacttgatgttgacagaagattcatttataaataaaaatgtccagaaagattattacatcaaaggatggtttgtcaatatccaccccacagtaggcctatcaagatgatcaaccgcagtttcaataacaataataaaaacaattatgattctctgtactaatgtagcacttttcatcagtggaccgaaaaagatctgtattaaatgatcttcagagcccttgaccacctgggcttgaagtatccccttggaggaagaatctaaatcaacatcgtgttcattattatgctgaaatggctttagcaatccttgctcagccagtggcatctcacactgtgtgcaccacacccacatgacaaacagaagagtcctctggaaaggagagagggtggcaaaatccagcttgtgcttccagtccgattctttcctatgccttacttcccccaaaatacctatggagctgagacgttcagggtttatacagtccatatataattattaaaatgtatacattatgctttaaagttagtaggggtctctactcatttttaaggaaaaacaaaaagctatgttttttaatcgagcttgagtagtagaaatacacatggaaggacaattcataaactactgtgtattctcttctattttgacaggttacggctgtcacaaactttggtatgatattagaaaaaatttaatttattgccgcttgtcataaagatgccaactctgccagcctctgatacaatttggatgtaaatatttagtgacagatgaggaaactcactcagagagcttcctaggtcagattttcaccattctcctttaacaaaggcagagatgatcttgggcaggctgataggacagcaagtaatcctctggcaggaatggaaatgaagacaagtatgaggcatggttgaagaaaatgaataaatagggaaaaggggactcaaagacataataactgcttcaggtgtgcagagggccatgatatgaaagaagtagatgcttgatcattaccatcctgaagaggcagagccaaggccagtatgaggacacccactggtggacgtttcacttcccagtgacgaagcaaaagtcatgactattcaacagagttgaatcatcaggaacaagaaaggagagaaggtataggtgtgctcactatgtactcactaattccacaaacatttgctaagcatgtattcagtgttgggcaccatgcaagacgctgtagatacaatggtgaggaaagacaaatatggcatgtcttatcttggatctggtggtctggtgaggattctgggcatcacacacatcaatgcagagccccagcttcagcgcatcctgttaaggggcagtgggtggactgtggggctgtgaggctgacctagtgttgagttcagagaagcttccctaagacagaaacacttgagatgagatcaaactaagaggagaaataaggcaagttaaaaagcacagggaacaaaaaggattccagagagagttagaaattccagtttgagaaaacggaagaaacaggaaggggtaaaagagccctttcaggtcacatttgggaattttgccttcttttaggaaaaaacataaagtcattaaagatggtgctgtggtttgaccgtgtaccccacaaagaatttattggaaacggtaatccccgatgcaaccatgttgggagatggggcctaatgggaggtgtttaggtcgtgagaactccaccctcatgaatgtatcaaagctgaatataccagggctcagggctgggagttcaatctcttgctatctctggtcactgtcttgcccatccacctccctccatgggatgacagcaccaaagctggggaggcatctttttgagaagtaaaggggtggtgacctggtcacattgctactttgaaaaagtcaaattaggtataggatggaaagtggatggaacaggccaaggtctatccaaggaagcagaaggggtctgccctaatgtcagatgctcctggatctagaataacttttgcttcatgcacttactaatttagtcagtgttcaacatgttaaatgatattttgaaagtagaaattagattttatggcatcaaaataacttgttagtgtctctgatattactgctgtggttgccaacaatatttcctttagacttcaggaatattattctgtgttcttagcaatgtcaagataatgtaattgaaatatgtcataagttattctattaattatcaaaataatcaaaaggaaagacagcatttattgataccatttattgtcttatccagttgtatgccagatttcagaaaacagcagaatgaagttaacctgaagaattagttgtttgaaaaacctgcaaaacttagcatgaacttaaattttctcacctctgtaagttacattatttcttgtgatgacacgtacttaatacacaaatgaagcgagcccatgatagcttttacacagatattacaaataaatgtgtttataaagattttatggaacagtatggagaagtaaaggagttgctataactcaaaggtattttctataagtgtccagaaagcaatgtcaataatttcctagggctggtggttaaatcaatgtgagtgaatgttattattccctcgtagaaatatgttatgctttctacaaagaacatgtatgcaaagctattcctaattatttatttatttattttttaacagtggtttattttgtggcttaacccagtcacttacaacaaactaaatgagctaaggatgagtttttgttatatatatgcatgtatgtttacttataggttaagcctttgttgtgggtggagggtggggatatgtgggaggaaactaaagtaaaggaacatgatgaatcccacttagaatcagaagaaagggatgtaaacttttagagagggctatggttgaacagaataatacaatgcagtattctcgttttgcacgcgctttgccatggtatgagtctagtttgacatctgacattttgacaaaatgaaaaacaaaaacaaaaatattagccaacaacaaaaacacatacatacactactgggattatcccgttaggggataaagctttcagttgtgcaatagggattgagtgcttaagaataacagacacacaagagcgtgggcacgtttcccaccttccatccacactgtgagaacagacacagaaacacacctggaggcccctgggctgcagggggaacccatgaaaggaggatactgtcttccttagagatctccaaattgtgtgctcaaattcttcaatccattccctcatacattcattcatcatttatttaacaaatatctatcaatcatctccagcatgccaggccctgtttcaatgattctgacacatgccacggggtgaatgaatgaagcagatggcactgcgcccattttacaggtatggaaagggacaataaaggaccaaggggtgacaaagtggaaactgaggccagggtcccaggtatcttgctcaatatttgtttgctttggtttagtttagaacagtgatattttaaccacgggtgattttggcttccgaagggccagggtttctgctacagtgcacagaacagccccaacaacaaagaatgatcaggagcaaaatgttgatagtgctgctatttagaaaccctggttcagggaaaccacttggaaacttcagtggatgatccagaatttatttttgcctatctgggtaataggaaaagttaaaaaaaaaaaatgaatttcttctaagctgttgacacagccatgtgattctttcataaatgagtttcaatctaagttctaatttttgaaaagaggtgtttacttggcaaacttcacttgcatttaaaaaaaaattctacagtgtgactatccattgccaccacaagcagcagcacttttacctgtcagagatggcgtctcagtgtgtagttacagaatgcacagaacagaggacgtctcactgctgtatcaggacactcaatccatgtgtggtttcccaggtgaaactgtagccctcctgctgtaaaagtcacccgcttaatgaggtgtatttaccctgtattagtaagaatctgtagttcaaaaatgctgtatttggggcaaaaatcaacatctctgaattcaagtaccctcgccccctctctcagcaagaagtttgtgtgaagagacagctggaaattctagcccttaagatgttaaacaaaaatagggataaatttactgtgtttacacggcatctttagtttccaaatgtgtttattctaatatccctgggagataaactggggcaagactcgacatcactacttactgaaccgggtgcagggcagggtgcttagatgtaaagacaaagtggcttacctctacggcttcctggccaggacaacactggctttgttatttacctccctatcaaagtcatagtcacgcccttagatcatgactgtaagcgtttcagaaggctgaatggttctaaatcctatagttatataattttgaaaatcagttatagctatgtttttgctcttcaaatctccttcatttaagtaaaggccccactgggaaatttttagattgcctgttaagaaaaaccttgtccaagaacaattgttctatcaaaattcatgatatcaaagaaaagtgtaaactagaatatcttaatttctttcaaggcatccaatctagttttctctgaacaacaaaatggaaaacctcagtcttcaaaaacctcatggacttttctcagcttttccaccaacacactggactccattctctctgctgtctaattgcatctgataaacatatttatgtaggcaaagaatgagcccatttgagtttctatctttgttttcccacagggagacgcacaaagatgttcggtcctttccttctgaaggctggacagttctgtgtgacgcacacacatatttctaagcgttttgcagcactgtgacattgcttaatgcaactcacaggggtgtgaagggctgaaaagacctttgaggtgagtacatgtgatgaaacaacacagagaaaaagtgtagcagggactaatttatttacggtaaaacagttcctatttctttaccttcagtcactctaatcatgttgaagtgaggttcaaagagaaagaaatggagcctggaccacaccatgagagcctggaaggaaaggtgtagccctgagctcatcctctgcagaggggaacaggcttctcaggccaaggtagatgacaaggagagctggcctccaccagaaactgccaaaagctgtaagaagctcctatctggctctaggcccttcataaccagacgttgatttagaccctaggaagaagacaatgtgataggattcatataatttatataattaataattatgtaataattattatttatcttatatatttatataagcatatattataattaactatataatttatatgattaattgtattaaatattcatataaaaatgggcttttaatatattgaatacatatcaatataccattttgatatcatatataaattataaattgcattgtataattatatattatacttaattatataatttatataattatattaactattaatataaaaattgtgcttttaatatatggattacatatcaatatagcatactgatataaaaattaatccctcaatttaattccattcatttatcacccacaatcatttattgagcacctgaaagcctgagttgagtacctccatgcacttatggagcactcagtcccttcctggcaccattctgtatactgaggacatggagatgaaaatgcacagccccccaccccctgtgctctcacagtggctcgcagcccgttgcacaaactgaagcataaataagtcattacaaggtgaggggagccacaacagaggtgtaggcagaacaagacacagcataaacaagggcctacaaactccaccaagaagtgatggatgacattctcaagcatgacaatgagtgcgatatttggcgagggtgggtactctgggtgagcagagataacttggaaaaaagtatctgagtcaacggcacaacaatttacaaaggggtcctccaggaagtatgctatgcaaagtatggaacaaatgaagaaagatgttgcctccaggggactttctagctcctatttttaaaaggatgtgtgtttttaactccttgagattagcagcatatgaaatgcacaccaattacccatacttttgattgattgcctttaatcctccactcctcttatatgtggttacaaatcctgcaaaattttgatgaaatctcctaaaatgataaagcagtgatgccaacagatacatagcctaatgatatgcagaagcagaagataacatagaattagtgaacacagaaatggaaaagtctcaatctcactattaattaaaagtatgcatttaaaaaaacagtaactttctgtttattgtattatcacatattttgcacagtgatcatgtctaatcctgggaagcatcgagtgaatctatatatttacatgtggcaattgtactatatgtctttagaccattgacctcaaaagaaaggaaaaaagaaaacctctatgcacaaagatgttcacgtcagtattatttatgaaattaataacaaaaatagagaagcaaatgaaacttccaaaattaataagagtgttaaatcactgtacatttttagatgagtcatggtattattcttaatattaacatttataattattaaagctcctgtcacatggaaacactttcaacataatgattatcaaaaagtgttagaaaatgacatgtatactatggtttcaactgtataagatatttatttacatagacgagaatcagaaggaaatatcaaaataacagttaatattacataaacacttttttgttatcttgaatactcagactttctgctaatactttttaagcagtcctaataagactagaatttggatcatttaataaaccccatagtaaggaaacaatatgcgtagcacttctacaaaagtcttagacacacacgcacaccttcatgttaaggtgaaaaatgtacaagcatatgaaattaagaaaaaattgcctcatatggatgggagtgaagattcattccaaattttgccttgagtagatttgcaagttgtcattacagtgccttctcttatttatcagtctgagcacaatggcagaactcggtcatctaaattatccatttaccttgtatatggaattaagagctctgtgttagggagctccaaatgtcaagaggcagagtcatgccggggattgattctgtagattagaacatctccaccaaggcatttggcctgtgagatgtctaagtagattaattgaagtagaaatgcattatttattatttaacacttagtgaaagcagtcagcaagctaggtttaataatgatttcttttagacactcaccgatgcataagaattaggtaaacatgacccaatcattacttgagaggtttatcaggtttcaaatcagaacttctttttttttaaagaggcaattagcattgtgatattcctcttgcctattagaaaagataagttttatgatatctatgggatctctaagaattaggcctatttagacaaggaatgagagaggacttttacactgttgacagaggtccattcagtcagggctatgtttctgatccctgtagataagtctagaagacaggaacacactaactggcctcaacattcctaatggtgactactaattatttcagaattggaggaagacttgccttcctgttacagctgcctggattgctggagtctgattcatacctagccatgtaagggaaagctcatcttctgcctggacagtgtcttggcactcctggatgcctggccccttggtgtgtgctccccataatgcataagttgcgtcatatttctggagtcacttcacccagcacagactgatctgaatcttcttctttttcagtgaagtcagcctttgaccagagaatccctaagccatggattctttctggctttggaagatgggacagaagatgtagatggttaaccatcccccaaggatggaggatctcactacccttcacacccagggatgacctcatcattagctctaatatgaagtctaatgcttccagttgcataagttggggcaaagtacttactctctctagggttcacatttttcatggtaaatgatgtctatgatagaggggttactgctgggactaaagacagaaaacaggccaacggcattctccagtggcttacagacaagcagtgcctgatgtattttgggtcctccatatcactttttaaaaaaattatggtaagaacacttaacatgagatctgcccacttaagaaatgtctaagtgtacaacacagtattgttatctataggtacaacgttgtaccgcagatctatagaacttgctcgtcttgcctaactgcaactttatgccctttgaatagcaacacatcaatttcctcccactctcaacccccggcaaccacctttctactctcgctcctgtgagtttgactattttagatgcctcatgctacatttgtctttctgtaactggcttatttcactaaacacagtgtcatccaggttcatccattctgctgcatatttcatggtttccttttttgttcaggctgaataatattctattgtatgaatataccatattttctttatccatttttttttttttttttgtgagatagagcctcactctgtcaacccaggctggagagtagtggtatgatctcggctcactgaaacctctgcctactgggttcaagcaattctcctgcctcagcctcctaagtagctgaaactacaagtgcacaccaccacatccagctaatctttgtatttttagtagagatgaggtttcaccatgttggccaggctagtctcaaactcctgacctcaggtgatccacccatctcgacctcccaaagttctggaattacaggcatgagccaccacgcccggcttccttccactctttcagcaatggacatttaggttatctctataccttggctattgtgagtagtgatgcaatgaacacgggagagcaaatatctctctgaggtcttgattttgatgattttggataaatacccagaagtgggattgcttccactggtagttctatttttaatttttttcgttgtcctccacagatttctctaacacatgcttctaacttcaaatttctttactcatagcacggattccagtaccgatccactctcaatgctgcccatttctgtatttttctgacaatttccaagtattttatgaataagtatctcttttcttggctaatggatagaactgaaattgctttataactaccagtggtgactgtgatgggaaggatgacagctgatgctaaaaaattaacactgaacttcagagtggtagcaaaaaaatgagggttatttcagaaaccacaatttataaacaacagacttcctaacaggctagaacaataagaaagtaaaattgtggatccccatcctttcagtgttggtttgtttttgttttattataattatataataaatattacactttcattttatatacagaaatgtgaatatttaaattttattataatagaatctttaataaaatcaacaaatatagtacactggaacaaatacacctatctcagaaaacacattgagggcagaaagaatattcacttataagtgcaatcagtgccttcaattatagttgagttccaaagatataaaatgtaaaatgtaactatatcatatatgatggtttgcttcctgtgaaatccactcattaataccttaaaggccttcccgtgatcctgtttaataatatattcttaaaagggtgttattctctgcaacacacatttttaattctggatatttaaaaaaacaaactcaacatttttcttggcattttttgcaaatgaattggagttcattcagacattcaattcagtaaaaacaaaaaacacatacatttctgcagagccacagttgaagagcatgggcttaggagagcagacccccgggtctggtcccagttctcctgcccctccccagcttactgtgtcaccttggctgtcccaagatgtgagttcctccttggagatgcagttcacagccagagtgatcgctaagcttcctccctgcattaaaattctattattctaagtctttctcacttctctggaatttcctgtgatatggatgcttgcaattattacacctctgacaattgatgccaataaaaaagcatctacaacatcggacaatgaatttcttatgtttttattccatacaaaatcatgtagttaggttcagaaataaaatattcatcacacattttgtggtaggctggtcttgctccacgggatgaaaacatatgtcgcaagagggaacaggtttgcctaaggacccatatgaacgaattcaaaaagaacctaaactcccaaccatgcctatctctcatacatgagctttctctcattaccaaccaacgtaaatatcaaaagttgatcaatgtagaagacttttattacacattgttcccacaaactactgtgacccacatgcttaggaccccaaaagcggtgttctcacttgcatccactgggtacacactggggaagtctctgggaccaggtggcaaataagacttttggaagtcttttccctgcaagaaagtgatggcaggatagtgcaatgactggaggcagacaaaacaaccacaaaaggccagagaggacttgtagctttacaggctgatcatttttattatgtgttattatatttaagaaagctctaaatatttttccaaaagactgaatgtgcttaaaaggagatacttttgttatccaattgctggttctctgctcaaaggacaaacaaatgaaaacatcagaaattctccagtagtgagaaacaatgcataagcagtcaaacctccaggaaaacttctgaaagctgaagtaggtgtatgaaaaatcagcttcattaaagcaatctatgagagctgcttgtctagtaatagctactgtattttgtggcacggacttgattcttagggactcctggaagttacactcaaaggtgcatttcataccagtcactcctccatatccaatatcttgttttacagttttacagtcttgcggccgggtggcggcaggggacaaatgagaaggagagcaagagggagcacatcaatgagaaacaatgatgatgagataattagagtgagcaataaagaattcatcacagggacagaggaccagaccaatgatcagcagccgtatctattgccttgtccttgttgttctcttttagtaagacctgagcatagaatagagtgatgcagtagaccaggatcttacatgtccattcctcttccttaggagagtcctcagatgatcctcacacagtgtgacttatccttcaggacaaggttagctgtttggctggggcttcagtccctggtcatttgtcatgagattccgggtcttcacaaagaggcatagagaacctgctgagtgttttcccttaggcctcagtctacagatgaaaggcttcctcaattaaaagccaattcttcaccatttgggcacccaaagtagacctaagctatgcctaactccacccattcactgtgtgattccattcctggatacaaagtacctggtatcaggatcagttcttacagtgggcctgatggtatgaaaggctggattatgtcattgtagaaggaattgagagggtagaagttactgattgggaaagagagagtcttcaaaacttaataagccatgttttcagtaacaaaaagaggaaaaaggattgggctggatgtttgttttttcaaagcttaacacagactattttttaaacatttactaagcatctacaatataatgtggaaatggagataacgaaattataagtattcttttttaaaaatatattttttattttatttaaatatttttaaagacaggatctcgctttgtcacccaggctggagtgcagtggtataatcatagctcactataacctcaaacttctgggctcaagagatcctcctgccttggcctcccaagtagctgggactgcagtgctcactaccatgccctgttaatttttttttattttttgtagaaataagatctcactatgtttcccaggctggtattgaactcctggcctcaagctctcctcccagcgcagtctcccaaagcactggaatacaggtgtaaaccaccacacctagcctataagcattcttaaataacttgaaagacaggagctaactaaaaagcagacagaaacggggaaatattcagctgaatgctggattattttgaatatgcaaaatttagcatggtctagcatggtcaactcccagcaatcattacggaaccgggaaattgttttccatttacttaagagatacctccattgattaaacacatattacatgtgaagactcttctgggcatgctacttgtataactttatttaatcaccaaatcctctgaggtaaatcctattatcaaaggttgccagttttagcaaataaaaatacaaaattcccagttaaattcgaatttcagatgaacagtaaatatttgtaatataactaggtcccatgaaatgtttgagacaccgctatgcaaaacattatttgccatttatctgaaatacacatttaactgggcatcctatgttttacctggcaaaaatattattattattccagttaaatgatacttcatcttcaggctaccatgctggtcaaactcttgtcaggcattacttggtgttagacaaagggtacgataactggatgaagccaagtttcacagaatcttcaagacatttttaaggtggcttgcgggcttaaaaaatgtggcacctatacaccatggaatactatgcagccatagaaaaggatgagttcatgtcctttgcaggatatggataaagctggaaaccatcatcttcagtaaactaacataggaaaaccaaataccacatattctcactcataagtgggagttgaacaatgaaaacacatggacacagggaggggaacatcacacaccgggacctgttgctggatgaggggctaggggagggataacattaggagaaatacctaatgtagatgatgggttgatgagtgcagcaaaccaccatggcatgtgtatacctatgtaataaacctgcacattctgcacatgtatcccagaacttaaagtattaaatatatattaattatatatataaattatatatgtataatatatatattatatttatatattatataatatatatatatttatatctctataaatatatagagatatatatatctctatattaatatatattatatattatataatatataaaaatatatatttatatatattaatttttatatatatatatatataaaatcctttccattgtctgtcttcccaactcccaaaggtaggccgaactgggggcttggagagagcttatatcacttgcccaagacctgtgctaagctgcctcatgtacccttaaaatgaaatatgacatattattctgagtttaatacatctaaagtcaggctaccctagcaaaacttcttgcttaaaaattaacctgtgagcacaaaaacatggcagagctgcgacctggtttaaaagagtgatgcctgaggaaagctagcagcagctaacattaaacccaaggcccccagcccaactctctcaggcctctcaagaaagataatttttatttaactgatatttgtattgcatttattgtgctgggtgtggctctgtatcttttattcttctgatcttcataaaaccctacgacgtagatcctattattattccaatgctacagaggaggaaactgaggaatagaggggttacataatgtcccaaggtcacatagctagtaaatgacaaagccaggattcaaacctgggcaggcgggctccagaattcatgctctgaaccactaagcaatgtcaacttgaattccatatattataaaattttggaaacagatcaagaattctctgcatgtatgaaaaagcacatgatctattcatcatttccaaaactattttacgaacatcatctcctttggatcttagagcaactggataaaggacaggtaatataggtatcattattgctattttgcagaccagattaagagagataagattgtgagcagtgatgcatgacaagttcaacattagtaaattagtaaacacagagtcttatctaaaccagattctctatccactttacctaggctcaatacggtaagcaaaaatggaactcagaaaatgctaagaatgattgtcttgctctgatttaaaaatctggattttgcaatgcaggaatatctttaagtttgggattacaagaaatgtgaggcagggctgggcttgctgaagcaggatacaaggaaatgaaaaccatcactctgaattgtttgctcagttgtcttggggtagcttggtaactataccagaatgggaggcttaggtgtcattataaaggaaatccctactttggaaagtgacaccaagtgcggtcatcaacagagagctaacagcttttttctgccaactggaggacgtctactaccaaaactctgatccatgcttaaagtgcttatcagtgtgcccggcgcagtggctcacacctgtaatcccagcactttgggagactgaggcgggcggatcacttgaggtcagtggttcaagaccagcccggccaacatggagaaaccccgtctctactaaaaatacaaacaaattagccaggcgtggtggcaggtggctgtaatcccagctactcagaggctgaggcaggagaatcgctggaacccgggaggcggaggttgcagtgagccaagatcatgccagtgtactccagcctgggtgatgagagcaaaactctgccttaaaaaaaaaaaaaaagtgcttatcagtgaaaaaggtgattatagttgaatgaacacaaaagttgaaatctgggtacctcacttcccaaaagtcagtttcctaggtacaaagttgtatttctgggaaatcactgtggcctgatattaagtaacaagatgatgatggatttagatctaaagcaaaaatgagagagctattaaatagaaaaagacattggtgtttataatgtatattttagagaaaaagcagtaatgtatgacttttccaatggaaagcagaaatcagctgtgaaaatagctaccattgttgaactcgaagtgagtcactgtctgcagaactcttccgaaagagaagaatgtgggccgccagcacccagtcgcggctgtgatcttggagatgtcagagcaggcaacatgcctgctaatgagacctcagaagtgtctgatcatctcttctaattgctctaaataattggagagctgcttggcctggcctctccttcctgaagacggtcagttcaaatatgcaaatataaaattatttgaatactgctctaattggagtacgagctacccattatttgctggagaacaaaacaatatgactaaaaacattgactatcaaatccttcattttaagcttcactgagctccccaaattaccacgggcagtcctgacaaggaccactttacaagggagttgatgacccctaattaagacacaaggcgcttctagttatgttaatatttgaaattgaaattggtttgacctacgcagttccatacaataccaccaagtgaaactcaaatccaggcaccttaagttgacaaaatgtccaatagcccattaaatgcattgcaaattcaagttccatccatcccccacatcccccaagttgactgcattacagaatgacaaatccaaaatatcatacctgatcacatggttttctgtagaaactttatccaacaaaggacattggacaggcattacaaattctttttcctaccaggagttgggatccaccatgcacacatgtttggccactctgagctggagtggtctctctcagtttctctccacttgtcttcccagcaatctcttcttttttaacagaagtctcatcttctctcctctccctattccagtcttcatctttcattgtgttccagggtaccttccccttcactgatagccctgctcacaacttgaaaatttgggttgttttttttttttttttaaactttctaaacctatttctgcatctacctcagcaatatccaatcccattctaccataattttctagatgaagttacaaaacactgccttctcttttaatttttgttaattccatctcttcttcctatatcccatatttcctcatcctcagaaacaaaagtaaaactctcaacttttcccaactgcactcaaatttactctctctacccttcccatcccggctgtatttcttgaaagagtagttgacacctcctgccttgacttcctcatcacccaagagttccttgttgttttataatctgttatccagccctacactagagataagtttttcgtggaaattaaatgttaaggaactcttgctttggagtcagactccaagagctggatcccctattctctcaagggctaatgcctagctacacaatttgcttttcttccttttgaaataggattctaataaatttcagtgtctcacagagttattgtaaaaagtaagtgacacaggtgcttgacaccacactggtccaattttaagtggtcagaagtgctgaattttgtgtgttttccattgttattatgctgtgaggccaaatcccatgacattcctcaattttcatcttctttgtcttctcagcaccatttatttcaagattgtttaaagtatttaaatattctccttacccatgacaattactcatctaattccgcccttatctctgatgatttttctcctgtcttcagtggatccgattcctcccccaccaaactctacactgtctttaggagtgtaatcagctgatcctcacctcctcctattttcccttgtgatctccccatgaccaaaactcctattatccctgtcttacttatgggtaactcccaaatgtggaaggacaggctcagcctctcccacaaactatctgctaaacaaatcctgatatgccatcatctcacatcagcaagttaaaactaacaaataaaaaccaaatatctttgccttccctcctccataaggccttttccactctcccttatttctgcaaaagtcgttgttaattcccaggccccaggctatgaaactgacagccatctctaactcttcttctcatttgctcccagactccgagaattatctttatctcttagagagatacagagaattgttatgctgaatccaagcagacggttggagtaagaagaaaggaaatcttggaagaaagtgttgttttagaagttgtaatggctgcaaaagaattaaggaaaacaaaagtttcctttaacacctaccatgtttcaaagaccatgttaggtctgtctttcctgatataataatgaaaaagtcatcatttcaaaaagaaagggaagtgtgcaaaaattaatttctgatgataaactgggaatgtctttgatgagggaaatcaaggagcaatgtctacaaggatgagatgaccaaggttcatccagtgggctggggcttctcaaagacaaggagagcagaaggagagaggaactcataaccagtaatattatcttgtaattagattattggcaaagtctagaaacataagtctttaaaaaatccccaaagccaagaaggaaggggtggattttagtgttttactgcactgagaaataggtcaatgtatgtcacagacaatggaaaggagctgaaactacctgagttcctatttggaatcatcttttctgttgacagtcctcttcgacctaagaacacttagtgctataataaagctgaggcctcagttaggtgagagttgacattgattgactaattactgtgtgtcatggacacctcatttaatcttcacagccactctctgaattagaaagttaagtttccagataaagaaaatgagaccccacaggctgggcgtggtggctcacacttgtaatcccagcactttgggaggttgaggcaggtagatcacgaggtcaagattcaagaccagactggccaacacagtgaaactccatctctactaaaaatacaaaaattagctgggtgtggcgggggtacctgtaatcccagctactggagaggctgaggcaagagaatcgcttgaacccaggaggtggaggttgcagtgagcagagatcacgccattgcaccccagcctaggcaacagagctagactccgtccccccaaaaaaaaaaattaaaaaaatagaaattgagactgcatagatgctcacagcactcagttacttaattgctgagccaagatttttacactgtggactcagaaagccaatgagttaataactacatgatgcgactcttcacatctgttatctctataaaactaacttggggtcaggagatcgagaccaccctggctaacacggtgaaacctccatctctactaaaaatacaaaaaattagccaggcgccgtggtgggcgcctatagtcccagctactcgggaggctgaggcaggagaatggcgtgaacgcgggaggcgcagcttgcagtgagccaagatcacgccactgcactccagcctgggcgacagagcgagactccgtctcaaaaaaaaaaacaaaaaaaaccaaaaactaacttgaggactgggacactttataggggcaatcactgaatcattggcaacctctgaggagatatggaggataggaaattttcaaaaagaagaacaaggtcacctcagttttcaaaaagaagacggccaattctgcaaaataataatttctaacatgactcaataatcacttgttatgtagatggtttgtgaggacttaaacaagacatggttaatactatggagcaacacacattcttaaaaacagactaagtcagacttattgcatttccattttttttctgctgtacacttacaaacgagggagggagtcagcagactgatgcataaacacagagtttcacattggtgacgaacttcagggctggctggctgatgtttaagttcacatttaacatcctcaccaagatgtcacttggccttgtcaaatctctagtgtatggaacccactgcctcactgccttgcatattaacacatttcatttgtgaaaagttgagactattttggatagccgcgatgagtcagcaagtactttcctatattaagttgaaatctagtgccatgaaggtttccacctcttggttttgctttaaacacttggaggaaattcagcatagatctgactttctttccccatggagagtggttcataatgaacacaaatattaggcccctttctctcacctcctcactctgtttctttaatcaaccttcattggagaggagttttctaattacttcagtttccaatttgctacacagcatgagaaccacctagggagatttttgatatttttaaagatcttcttcaactgtgaaatcattccatcaatcagacaaaactacagaaagtaatacttgtctttaagtctattttgttgatattcatatagccacttctgttttcctgtgattactatttgcatgttttagcttgtctatcctttttgtttaacctagccttgcccgtatatttaaagtgaatctcttgaaaacaacatatagttggagtttcgctttttttaaaaaaaggccttataatttttgtattttaagtaaatgccttcatatttaataaaatgattgtataaaatgattgtatggctgagtctcctaacattctatttgtcttcttttgtctcagaagttcattgtttctttttttctctctttcacatctccttttggattcaatttgtattttataatatgctcttatcttcccttttggatatttagaacaccacatattatttttcagtagttgctctaaggattatgatatttgtctttagcacaatataatgtatcttgaattaataacacatcatataaaaaactaacaaaagtataatttcatttaccttctcccatccattgtgttactattgccatatatttttctacatatgttataaaccacacatttttatcatttttattattcttgcctacagagaaattaataattgagaaaagagcaacttttatattttcccacatatttataaggtatgttactcttcatttcttcctgaatatccagatttccatctggtaacatttgtcttccacttgcataatttcctttaacattctttaaagtataggtctactattgacacgttctctcagttttggttacctgaaaaatgttctcatcttgcttttattttcacaggctatatctgctatatgtagaattctatgttaatcttgttgttgcttcttcagcattgtagagatattattccattgtctcctggtttatactgtttttgcaagaagcctaaaataattcttatcattcttcctgtgtatctaatttggtttttttcctctggatgctttaaattttctctttagtttttatcaattttattataatgctcctaaaaattactttgttttgtatttttttgtctgggattatttgagcttcttgaatctgcagattgacatttttagtcaaatttggaaatgacttgatcttttatccttcctttttttcttatcttctccaacctctctccttattttttaggatttcaattataaatatattagatcacctgatattgtgccacaggtcactgaagctctcatcatattttttcaatctcctcctctccttctccttctcctccatctcagtgtttcagtttgggtggtttccatggacctctatgttaattcacccttttttttcgtactgcattttccaatccccattaaggccatcctgggaaatttctatttctgctattttatttttaagttatagaaattttatcttgttctttttgatagttttcatttatcagctggtagttcccacctgttcattcattatgttgatattttcctttaaaattggaacttcaactttggttcattagcaccccaacatctcttaatactatgtgtcctcaggattctccattctcacagtccctagcaactatattctgcctggcctcatggagtcttatctgcccatacagagcttagtatgtcactcaaaactccagggaatccctatgctgatatatagaactccttctctgtgaggttcccctctatctagtgcctcaaccaacaaactcagttactaatgctgatccagcctctggtctgtttcccccgcccagtgttggttctgcttccttgtgtcacaggttggaaagcatacccaggcaaaagactgagttgaatgtggggttcactttatgtgtctcccttcttttgaggagcacagccttgcattaactgtagagtttaatatctgaaaatagttgcctcaggtattttccttactttcatgaattggcaactatgtctaaaactcattaattcatcacggctgcaactggacatctcatttagcattttattaatagtagtgtagctaaaaggttatctataaatattctacttcattcagctttttattgtagtaggtttctttaatttggtattccaaagacaatatgatccttaagctttcaaataccattgtatagaacaaatgtttatcaaatggtcataaaataaattaatgaacaaaagtaaatgtaattttgttttgttatttctaaaagcttttcacttttcattatttcccaactgaatttgcatttttaggtttgctttctccttagcttaatctgtttctgttctgtttctcctggtggaggctgggataaggatgtaaggtcaacactcatagagtttccagtctagagacataaaggggccaattaaaacaataagaatatagtctgtatcagtgggaccactgaatgagaccttatctctaaataataataatattttttaaagtatttgtaagagaatcttatcacttaatacagtgaacactaaacatacaatgaacacttaacaaatgtataaaagattggtcttttgctcctattttagttttaaaactcagttattggaaaaggcataagttaactaaggaaaatcaaagctttgttttacttgtattttgcatgctacatggaaattgtcacaataagaaaatatttatgagattaaattgacttaagagcaaagatacattgttttttaagtaccctatcaagttattttcagaatatagactgggaatatgccctggaaaaacatccaactatttaaacctacagtaatttacattgatttctgttgccagctattgctgctcaatgctcaacattacatcctgtgttgaggtgagtaaggtaatgaagcattaagtcaggcctggactgaagaacaggccccattttggctgcatgcccatgaatgaacatatgttagggcacagccaaactggcagtgtctggcatttcttcctggcggtcgccacagctgacctttttttttttttttttttgtaatactgtgaatgtgtgcgtgttccaataactcagcttaagttacgccttggagatgcaagacagatctttggcttgtctctagctgagctttcccttcaaaatttctggcatgctttagaatgaagacttagacataatttgagacacatcttttattaggacccaaccatgagttggtcaaatataataaacttccttctcccacagatagtaaatggatcttcaactctactagcacatttaccagtctgatgagacatgttttaaattttccaggagaagggacctctatctatcaggcagctgtcctgggagctctgccctgactcataagtaccacgaaacttactaaactcacagcctctcagagaggtttccataaactgacctacttttttcagcagtcatttcacagaaatactaatgtttaggtggtgattttgtattgtcatctaggtggacatttataaatatattttcaattgtaggataagaccaggctcaagaataaagttgatcagcttccagcatgttcctaaatgtctagacattcacacttctttgtaaagaaatcctttatattaaaaaaagtaagacatagaagcccaataggcaggagaagagaatgattcttttgggaaccaaaggatccagaaactttaatgtcttcttttctcgtccacagatggttacaaacacaattgtaaagaaaattgatttccagtggcatctgtctcctacttccaggcccctttcctcatgcattggttctgtttcccaactacctcttccatcttcccttcaggcaacctctgtattgccatgctcccttatcttttatcaaaaccttttcttagacaaggtcattatatcagtcattcacaccttagtatgaactaaagtagatgtcttaccttgataattatattgtacaccaccttcctccactagaaggaatttctactatcggagtataaagagttatttaagataaaggaggaatttcttagcaccactgaacctgaaaacttactctcctaatacataagaccatctctggactaccctaaccatttactcttgtattcaatctcttggccaatacttaggataaaattaattctgggacaacagtcttgagcatgatgaatatggtatttgccacaggggttcagaggaggaagacagcccttctggttgaaaaaatcctggaattctttatggaggaagtaagattagtactgaaccttgaaatgtacatcctagaatctccctctgtttctgcagctgtaaaatgtttgtggtgagatttgactagaacaaggtgcctagaagaacctgaccaagacgctctactggttgactgctggagtttggaatttgtagagaagatagaattacaggtaaattttggcctcactgtgtcatttttagaggccaccttcaaaatatccagctaagtgcacgtttttctcctgttgttccatgtgcaccaatcaacatttcctttggggtaaatccccttaaggctacctctgggaactgggagaggctgtgtagccctctctcattgattcatccctagacctgatcccatagttgatgggcagacagtagcctgagagatgctaagagttgggaaaggtaaataaagtaacaaagagacagatgatgacaatgtaaaagccagtgcagacaacgtacgcacatctatttatcacatttttattgagtgtctctatgctgcatgctggtgtgatagtatctgttgtgggttgaattgtcatgggttcaacaaaattcatatgttgaaagtctaacccccagtacctcagaatgtgactaatttagaaatggggcgattatagatgtaattagtccagatgaggtcttgcgactggcccctaattcagtatgacttataaaacggggaaatttgaacacagaaacacacacactcagggagaatgccacatgaagatgaagacagagatggggtgatatgtctagaatccaagaaacacaaaagattgccagcagccttcagaagctaggaaagagcctggaacacattctccctcacagccttagaaggaaccaaccctctaatgctttaatatcagacttctgacctcaagacaatacatttccttttttaagccacccagtttgtggtgtggcagccccaggaaactaatccagcatcaaataaaatatagttcctctcttggggcactcatagcctgaagagagccaggagaactttgataggggctggaggagagcagggaggtaaccctaccgtgtggtgtgagtgtgcaggagttgggagggggtatccagagggccatttctggaaggtaagggggaagagcactggatgaagagtgaagagggccaagcttagttcaagctttgccactctctgggtgacctcgggacatcactacttcttggaactacagtctcctaaagcagtagataaaaggttcctaaactaatgcattaaaggttaggataaatgaggtcatttctaagttcctccagctccactattcacctcgctctatgtctgtcccagggacattgctaaagctgaggaggttcaaatggaaggcaagagtttccaaaataatctctgaagcctttttaaaattcactgagggctagctctgggcatatcttgggtatgaacatttcattgtccgttggcttcattttattactctgctttcttgtctctggctgtgcacgggactgaaattgctcactctgtgaggctgggtctatggacgtaaaattctctttaaacagcatgcagcacagcatgccatggagctagatgtcttggaaaggcctctctgttgattattttcaagaatggcttcagactatcatctggttggtatttctttttttcttcttcttcttcttcttcttttttttttttttttgagacagagtctcactctgtcgcccaggctggagtgcagtggcacgatctcggctcactgcaacctccaactccctggttcaagcgattctcctgcctcagcctcccaagtagctgggattacaggcatgcgccaccactcccagctaacttttgtatttttagtagagatggggtttcaccatgttggccaggatggtctcaatctcctgatctcgtgatccgcccacctcagcctcctaaagtgctgggattacagatgtaagccaccgtgccgggccaacctggttggtatttctaagacttttgtattgctcaagatcacccttgaaaattacaactctccttctagtccaccatccagcactccttccccagaacattatcaccctctggcccattatatactgtatcatatgtgatatttactttctgtctcccttgctgataatgtcagctccagaaaggtaggactttttagctgctttgatcactggtgtatcctcagtgagaaatgactgctacggtttcaatgtcccctccaaaactcctgttgaaacttaattcccaatgtggtagtattgagaaatggggcctttaagaggtgattgggtcatgaaggctctgcactcatgagtggattaatccacccatggattaatggattgatgggttaatggattaatagcttattgtgggagtctgactggaggccttctaagaagaggaagagggaccaaagcaagtaggtgagcaccctcagctccctggccacatgaggctctgtgccacatcaggactctacatagagtccccaccagcaagaaggccctcaccagatgtggccccttgaccttggacttctcaacctctataactgcaaaaaataaattccttttctttataaactgtttcaggtattctgttataagcaacagaaaatggactaagacaatgaaaaagaggatctcttaaacatacatctgcaactggaagaagtcccagccccctggcacccagcctaggacttggcatttgataaatgctcagtgactgttgagtgaacacatgattgcccatcgctccacacagatttagtcttcactgagaattccatatgtacagacatggattaaataattgagaaagtgaaaggacttaatcaagttcatgttaattaaaggtgagaacttacattctctgtcttggtaaccaacctgcacagtcttaaaaagcagaacactagaaacaccttggtagaaattaagcacagaaagaactattaaagagcatttgcgctgagggatcttggccctagtagaatgtggggccagaattctaagatggtccccaagataccctctcttggtgtatgtaagccctataaaatcccttcctccaagtatcagcagaaccttcgaatacgataaggtatcagtcctggaattatattacattatatgcaaatggcagattatttgggatgaggctaattcatcaaacgaggtctttaagagtgtttactccacctggttgcagaggagaaagtcagagacatgtgctcttgttggcctgaaagaagcaactatcatgtggtgaaccacctacaggggccacacagcaaggaacggcaggcagcctctagaagccaagagccttcctggaccaacatctagcaagaaaataaggacctctgccatacaaccacagagaaatgaatcccactaacagtgaacttggaaaagcatcctaagcctcagatgagaaccacagcacctttagatgggaacagtatggtagtccgttcaacatcttaattgtggtctgtgaaaccaccagcagacagccctgccatagccagcctagacttcatacctacaggaactgtgagaccattgatatgggttgtttgcagtcactaagtttgtggtaatttggtatgaagcaatagaaaaccaatacgcatagtgagctagctgagttcacttctcagtggttaaaaagatgaacaaataaaggttaccaagggctgtcgggggtaaaaggagcttttgtttaatgtgtacagagtttctgctggcagcaatgaaaaagttttgggtatagatagtggtgatgggtacacagcactgtcaatatactttaatgccactgggttgtaaacttaccaatagttaaaatgataaatattattttatatatacatatatatatgtatatatatatatatatatatgtatatatatatatattttttttttttttttttgagaaggtgtcttggtctgtcacccgggctggagtgcagtgacgcgatcttggctcactgcaagctccgcctcccgggttcacgccattctcctgcctcagcctcctgagtagctgggactacaggcgcctgtatgctatatatatatattatcacatttttaaagagagaaagatgaataaataaaaagaatattggatcactctacttctttgattacggccaatgatattcttctcaggcccctaatctcagtcctattcaaaattaattctaattgactcaaaatatccttcaacttaaaaataaattttatttttttaatattttaaaaatattttaaaaataagttctctatcaaatgttgagtcttgctgactcatgcagtagagggattagagaaaccagtacaaatcaggaagagtgaaaaatagcttgaatcctatgaatcatcttgagctttgacagacaggaaaggaaaagacagagttatatgccctggcaatgtgagaatgggttgggtcggaagagtagcacccataaggcaagatggaaaaccttctggcattttacttaagccccatggctgctcagggctgacctaagcaggacaaagagaccaccaaggcaggtgaagggcaggacccagacaggaggtagagaacaccagctaaactgtgggagaggattggggagagcccagcaatgaccaggaagctttttgtctggggccatgaacctgggaccctacccagcagtgacagcccagatgacctgtcagggaggaaagtcctgggaatggtgacaacagatgccatggagggctgggatgctcaggactgagatataaggattgtctcaatggcacctttctagaaggggaggatttttaagagtttgacttcagaatttggttccctagtcatggattgttgggcatggtgaaacatgaccatctcagcacaggcctatagtctgatgaaaataagaactgagctctcctggaaggtagacttcttggctgtggattgtggtctggtcaatgcatcctcaacaactccagatggagcttcttgtttggtttcctaatctcccatccgcacaatacccaaacccataaataaccctctgcccctcaaaccattctgccttttgttttcttctcacatcttgtacatcaccctgcttctatggaggatcctgcaatttattaataataataaaaacagtggcaacaatacaaaaccaatattgcttatgggccatccacagtgcactgaagccatgctaagcactcaagagaccttgtctccttcagttctcacagtagctttaggagatggtggaggaaagagctcagctcagagagggtaataacctgtccagtgtcacacagccagtgagtgggttatgagttttaacttaggctcatctgactccaagacctgcactttcaatttaggacgactcaactctccattcattatgatcctatgagaaggaacttcataagaggtgggccatggtttcttttttttgagacagagtctcgctccgtcgcccaggctggagtgcagtggcgcaatctcggctcactgcaagctccgcctcccgggttcacgccattctcctgccccagcctctcgagtagctgggactacaggcgcctgccaccacgcccgactaattttttgtatttttagtagagacgggatttcaccgtgttagccaggatggtctcgatctcctgacctcatgatctgcccgcctcggcctcccaaagtgctggggtaacaggcgtgagtcacggcgcccggccggcaatggtttctttatgtggcctttcttgccaatagtctggaagcggcactctatgtcagaggtagaaaggaagcaggcatctgtccatcaaaaggagaaactgggggcagacacttgatgacctacaggaatttaaggaaaagcataacactcatgcgtatattctaatcaagcaaaagatgaaaggccttatggcaaaaaggatagaaaatttcaaaataatagaaaatttggttggtgtgaggtcttgtttagtgagcgtcatttataacgttcattaaacattaggaaacaaaaccaacacactacacagtcgtccacagaaaacagtctgggcagaacacggcattgcttctcaaaacatttgagagtatgcattttcgccaggtgctcccttaacattttaaatctcactgcggtatctcttacttaaaaaataaaataaaataacgaaagctgtctctcacttacacaacagtccaaatattctgagtactcacagtaccaaaatatatatatataatatataaacacatttgtaaccctagttctgcaaaggtcctttatctctcggatattttgcaatggtttccataacctgggatactgcttgtaaaattcatctcgacaagctaacagattttcccgaaggctggccaagaataattttaaagaaataaagtggcttaacccagttttcttgtgtattcaggaaaagacaggatatacatttatatccttaagaagcaagtaatccaactttctttccaacatgagcttaaacatgtttggaagaagaaaaataactaacttattaagtatgccattttattttgctttgattgttccagaattagttaaagatagggaagatagcccccaaaatgtaaattatcaaataatcataaaagtaaaaatattgtgctaattatttcaaaaatgacaaatcaaactgggaattgacatattaagaacgacattttctatgtctggaatttttggagaaaaagttactatagattagataatgtttgaataactaaagcctgattcttagcagaaaaatctcttttgctttgaagtattttaacttaaatgtttctaaaatctgccttacaaaaagtatgtcctatatatcaattattgttctgaggtccaatgaacaaacaaacccaagaatgctggagttttcacttaggttgggcccacctccaagtctcaagtctcagctcctctgaggtggagactgccaggcatttgatggctggctagagaggaagaaggaatagggcagaatgaacactttcactttggtctttaacagaggtttatctccattcatagaaaaatgctgcctgtgacaagcagtcccaagaaaattccatcaaaaagtggaattacactttttgtgtaaagtggatggcacacagtcatggtagaataaacttcatagctgtgtggaaaggtgctgtagacagaggggaatccaatcaattaactttctgtggaatggaaccactttctacagggatcaggagtagaaaacagggagggagaatgaaagcccaagaagaaaggctgtttccctgtagccaaaggtgggaaagaaaccagattgtcccctacaacattaggcagtgactcagtgcaaatcctctgaaggcttgaattcattttgactattatgtggatactcaaatggctaaaatgaaaacgtctccgtccttagcaatattttcaattcaagatctgattaaaaagcaatgatacagtcagcaagggctgtgaagacctctgaacaaggtaatgccatcagaaataatcggctttttacagaaatggagcgaggttcccctacacacagactaagtgtgtgtatgagtcacaagccaatcagaaagaaaaagagcagaaacagaagaagttgtttaagaacataatacatactttcaaaaaattaaagttggcatggaaaacagtagcaatttgctggacatccttacacttagtttgcaggtcactggtgttttacttttggattacaaacaggcattacaggggccacgatcatttttgtgtgaatggcctctagacatttaaagaagaacttgttcagaaagcagggagataaaactacaggagtgagtagaccacaaccagcagcagaattagggtgaagagagccaggcactctcctcggacgcaaaatttaaagaggcaacaaaacaatgcaggaatcaaaatcaatcatgttttaatgtactattttttaaaaaccaagatcaatgctaaaagtcatgatgaacaaaatatcaaaattttaaataaagatggaatcagcgttcctgagccttaggcatgaacaagctcagctcagcactgttataaatcctgtcattatttagactttgacagtttgttcatcatagatttttatgcattaattttgattttaaaaatatatagcattaaaatattatttatcctgattacaggcgtttttgtgtgtgtgtccccttaaatgatatgcctgacctcaccccagagagatttagagaaagctccatggataactgctcagggcagacagaatgcccgagacacggtaattcaccgtctgtaaaagccaccaagacacctgcgatggtttctaaagtcttcccacttcagtgttcctaaattagctctaaatacttactttttaattcaggaaagaaaaacaaaaatcactggcaaaagtcatagagttaaaataatattgagaaggatttctaggttaataccctgacttccatttcagagcaaaattttaagttttcaaacagatcttttccatctctgagattcctaaactctagcatgtctgtgaactccttattagatattcaactttctaaattcacagagactaagtttctctatatattcggcttgtaaatcaatgaagagtgattattttaaaacagcataaactagcattgtttttacttttgtttctacgcgccaaaaaagaggaaatatcccttaaaatgaaaacaagttttctagccacaggaagaagacaaaattcaagtaactaaattatacctataaatattttggctgatcgttctagggcttgaagttttaattaattggaaatattttacacaacgttcagcaataacatctataaacatataaaatgtgcaaaacttctaaaatggcctggtcgttaaagtgttaaagtatgtgctaatggaagcatagcgagggagctctgctgaagatttctctatatgtcctcactttgcagcataggaaagattgctctgccacctattggccttccttatgaaatagatttaatcttacctggtagcaagcatttacctgttcctggacttggagaaagcctcaacttagcaaactgcaagcaactccatctggtcctctctcaggcttttggtcaagactgggtccaccaaggaaaatagcaggactcccactgtcacctctgtggacccactctgagaggcagcggattactcccctcaactgcacttaagaaggccacatattcacagcacagtgggccagaggctgttcaacaaatgcttgctggccccacctggacacaaccaggaatttaggctgaattaacctctcattctccgtacatggcctgaacacattaaaaaaggatgtcctcccccgaggtgtttggtggaccaggatggcaaagaaatatactaatttagctcatcactgggtcccacccaggaaattctacgaatgtgcgtgagtttactttgaccaggtatcttgacctggaatttcttgaattaactagaatgagatgaacctagttgggatgggaacatctaggacaaaatgataattctttttcattttcttttttttttttttgagacaggatcttgctctgtcacacagtctggagtatagtggtgcaatcacagctcactgcagccccaaactactgggctcaagagatcctcttgccttggcctctcaaaatgctgggattacaggcatgagccactgtgcccagccaatgataactcttgattttcttttcttgttgattaaatagcaccaaccactaaactttaaccagctgggtcaagtaatcaataatatttgtgtttttagcagggaaatgactaacatgtagctctaggcagttgacacagtcttcttgggtatctctacctcctgcctaccctccctatccacaatgccaccatatttgacagcttcaatgacttctccatcgagcctctctggttctagtctcattcccccaccccaacatcaccgactcctcctctaagctgcttccagagcggttttccaagatgcaaatctggtgacatcattccttcgtttgaaattcttcagcagctcctcatcccccatcaaaggaacctcagatctttatcatggaatatgtgaccttctgagattttaccttcctttccagagtcctttcccaccaatccttcatcagcctaatcaatactagcagtggggtggaaggaagatgagaactggtatagcaggaatgctaagagaaagcatctttcacttgaatattaaaatattcaagggagaatgaagttttaaagagtctttttgagtccattaacaaagttaatagaacagaagaacattagatatatgaaaagtccatccatggtgttgtgaatccatcctatgtactagaaccacaggaggcagctgcctggcacgtctttcagaatttttcaggacatagtaaaattatcttcatccttttggtagcttctatttaaaacacaacttcaaaggtctaatatgactaacttcatttaacaaatctctaaacaaggaaaataaggtttgcagtacccttttgcaatggagaagtatacagaaagatcaaagtatttccaaaagtattatggagaattatttatgtcttctaaaagattatatccctgtgcagtttcctatgataaggacctggattaactttgttctacaaagaaagaaagcctgatgtattatatgcttttccactgcctccttaagtggagccaaagaacaaagcattttccaggaggaatgaagttgtatctgtcctcagagctgcctagagatcaaaagaatctttctagcagttttattggaaatttcagaggcccttaactaatatttagcttcataaatgatgggtgttacagggtgggaaaaaattcccacttgtaaactaatgggtggttgtcaatcataatttttgaaaaatgttacttaactcaaataaatatatttctgatttctccttgttagtatgatggttttcagtttgtttacaggtaatctctcaaaccattgcttatttcttatctgcccaaaggtaaataaattgtggtaaagcagcattctatttttcagatgggaaaaacgtacaaatgaaactctgtgagcctattcaactcctggggctgctataacaaaggtccacaaacagagtgccttaaacaacagacatttgttgtcgtcgagttctgaaggctccaagtccaccatcaaggtgtcagcagggttggttccctctaaggctgcgagggagaatcagttgcagcctctccctggcttctggggatgctggtgatccttgttccttggcatcaccccatctccaccttcgtcttctcatggcactccgtgtgtgtgtgtgtgtgtgtgtgtgtgtgtgtgtgtgtgtgtgtgaaaatttctcctttttataaagacgccagattagggcccaccatagtgacctcatcttaacaaattactcctgcaaccaccgtattttcaaatgaggtcacattctgggactctaggggttaggacttcagcatgtgaatgtcggggagacataattcaatcataacattcaggtaaccatgtttaaggccatgcctaattttaaaaaatcaagaataatcggttgcagctgatgattcctcgtgtgactcttgcctcctttagttcttagaggcccatttagtctggggtcatcctgaaaactggtgccaggcaagggagtctgcagccacaggagtctaaccgcacagggctgctttatctggacagttcatgacactggggcctgatgcttcctggacctgctccttcaatggcgttggctcacatgctggggccaccatcgtcccctggtgaggtcggccggcaatttcttcccacagagtagctggcagcatcctgtcccagccctgcctcattatcagtcctggtctcctggcctgcaggtctttgttcaaactcaaaaagatgcttgaaccaggtgactatacactcacatcaaatacacagagaaaaatattttgaagagtaatgttacaaaatgtgtaattcctaaagtatacacgtgtccttattaattggcatggttttgatcatctccacattatttttccaggtatcctcccaacttgatcgtataaacctcaacgtattggagttctgagcatgccagtgtcctttcttccctggagagacatttctggctcttccctaaatgcaacaagaccctgtaactctacagagtttttcttattaaactaggatacgtgccagctgcacttgctactccactaatagccacttgagtcccttttagcaactatgtgatgatcaaggagtcaggagtcactatctcacctcctcctatttcttctcggcctgttggggtggcctgatctgccccggactttcccatttcagcactggtgtccacgttctgagacccctcggtcaggcacacctggacagtccccctcctgttaatttactttcttatatttgaatcaacacagcccaaatattattggcttgtagttaagcagaatttaaacagatcctatccctaaaacaagcaaaaaaagtgaagtacacggaaaattagttaccccttcctcataatttttctggaataatagggcatcagtaatactcctaacaggtagtttcaccctacctgggccttgctggagctccagtcctgattctgcagccgtcttctacacatctctgtttgtgtatgccatagccctgctcaaacccaggctgtttcaacagccccaaacctcctgagctctctttgtttccacccggagctcacctcttttcttcctgctctcagtaaaaaggcagtttcctttcttttctccttctcagtcagcaaatcatgctgattcttcctctcttaataacaataacttagtttatgtgatgcttcctgggtttacaaagggctcttgtaaccattcagtattagatcttcatcgtgacttagtgcagtgaggtggtgaatgagaattacctttattttcagatacaaagaccaactcagcaacaccaaggctggtcaaactcacatcattaagtactaagtagtaaatactggctcttgaatgtgggtcccctttcctacgctgtttcttctttttgaaagactctgatgttctctgtgtgtgtgtgttttctcactgctgacaccctagacgaagctgtcaccacccgccacccagatcatttggccctcactggatttcctggctggagagtatcttcctccagcaatcctatatactagaaccacaaaccatgggtccccatcatatcccctctgttataaacctcagtctctcatcaccacacacaggaggaagtcttcaatccctttctggtgaccaaatgctttcaaaccctgccccacttctgtttggctttaccactcggaccttcaagtatggactcccaatccagcccaccactgcagtctccaggagtgccacgcatcctcaaccgcacgtctttgctctccttttgctgggacagtccatgttccttctctgaacaatccaagaccttttatttcaactcatgcatggctccaccttaaggtctccctcaaccactccagcccccatttatttccaccttcaaccaagtcctgcggccggtttgcagatacaagtggactcactccttacccactatcatcccttctagtgacctttatctgcaaatttggtgaaaactatgttttccattctcattagcagctcaggttctctctggtcagtagctatgttctaggcagtcacccaggggagacttggaagggagctccctaggagcacccaagaaacacacacagctgtggcaggcatgaggtttctcctgtaatagttccatgctgtgggtgggtgttcctcctgctgtgttgcacacaagcatagctctctgaacctctttgaatttccacacactacctgacaccctacagcttacagactttcaatgaactagactgaattctgttgtccagaactaagaactccgaggcatacgctataatgctcctgctaattttggtactccgtcgaataccaccttacattatacctttttcatttaaatctctaattggtcagatactccagcccccagcagatatatgtagctccttcggccttcaggtccacaacaagaaaccggcaattgtgccatgccaataatgctattgggccacagtggctgagcagagatcttggaggggaaggaggaagagtaaacactaggacatgaacctggagcacccaccccccggcctgggactctgcttttcagtttctctgttagattccctcctgacttgcctttcttggcaatccatgtgtctgggtaggaagaagagcctggaggtgccttccacttggaaggggtctccagaataaatcaagagtcaagtgggaaatggagcagggaagccagataacctgcctctggcttcaagccatgtgctggcaagacacagataggttttacaccagcatgttaaaaagctggcacagatggaaacaaaaacactttattcttccatcacagcaggtgttcatatagaaatgcattcacttcttttaatcagggtagaggtattgagggaggaggggggacacagtacagatcagtgtatattgtccagactcatttcttaatttacatgtatttttttctaaaatataataaacattgctttgtcattcttcccctgttcctcaactgtcttttgtacccatcataaaacttgaatccattgacttgttgccaggtgacaagtacttgcaggctgggtccttccctttgttgtgtctgtagtgttcatggctggatcagggcttaggacatatcggggcttaggacatagcaaccacctgtgctaaaaaagaagttctcctgtccagtttagtttaccaaggattgaacttccttagagaggtttaacaccaatgccctggacataatacaccccgtgatctcgtctgctcctgttcagtgagcctctctctttctctctatctttctctctctctctgtccctggaagggttgcaggaagcagagcagggagtcaaggatttgatccattcctggccacacatggtcataactaagataactagcccttgcctacaactgcagtataaaccacagaagggcaggcaacaggctctgggcttcagccgtcactttgtctgctatctgctaattgtataaatactggctgaacaaatgcacttaacactttacacctcgaaaaattcgcatggaatccattttcatttcttacttgatgagaagaccccttccggagttatgactttagaagtctggaaattcaatgtggcacacatatgctgagatcccagcataggagaactaaaaacaaactggggtgattttttaagtaataaaaacaacaataagaactctaagccatatacaaataactgatggggaaaaaaaactctttttagcaaattatatcacagccaaaagtaaaataaaattcagtgttattttattatttttactgaattgtaattgtttaattattataaatgggagtcattgcaaaaaaaaaagtcattttggtcatagtagcccattgattaataagttccactgaatgtttaacaatatacagaacattttaaacaaaaaagagttaacagcaaagaatacatactccttgatgttggtttcgcttgtagctctaaatactgatggaaaacctgttccctgtcatagaaaactacttctctaagcacttgcactgcactaattgatcttttaattggctcagtcaacactctagtctttctacacaacaagttctaattgctacatgcaactggagcaacactcagattatcaagaagacagaggcatcctatcaacctctgcttcaagcagtgtgctggcaagacacagataggtgttacaccagcatgttaagaagctggcacagatgaaaacaaaaacactttattctcccatcacagcaagtgttcatatagaagtgcattcacttcttttaatcaaactaggagtattgagggagggagcaaacggtatagagatcaatgtatgttgtccagactggtttcttaatttacatgtatttttttctgaaataaaataaaggtgcctttgccattcttctcctgttcctcagctgtcttttgcacccataaaacctgaatttatttacttgttaccaggtgacaagtacttggaggataagtcctttcctttttttgtatctgtaatgcccatggctggatcaggccttaggacatagcagtcacgtgtgctatgaatgagtttacgtctaaaattcactcctatttgatgaatgtcttttctaattaagtaatagcaagcaatcagtaaaatgttataataaagcaggatttcttaacgctggcactattgacatttggggccagatcattcttctttgctgggctgttctgtgcgctgcaggatatgtggcagcatccccagcctccacccactagacaccagtagtacacagtagcccccctaaaaatcactgctcctgttgagaagtcctggactaaagatgccatacatacacagatcagatactttcctacaaaactacgcaattcaggcttattcatttcttttcgagaagttgttttcactaaaataacactccctggataggctcagaaatgaaacagagaggaaggaaaaaaagctgatctaaagtgatctaaatcaaacaacttcagtggattattaaaagcagtcacaacaaaaaatgaaaatgaaacaaaaagccctcgtaatccacgtctctctgaaggaattgtctgggaattatttaaccctccacccagcctttctgtgtgtcattctccatccatccttgatgacttgtctcctaaggagcttgttaggagttctgaatgcagccaaggaggagtcaggtctctcactgacaatggattatgctggtgtaaagcatgctttccaatttacagacagaagaaaatgaatggagaatggttctttaactcattgattcatttgtgtccttatttcttccctcacacccttcattccttttttcctccttgtgtttctcgtctttctacttctctttctccttttccttcttgacttctagactctttcatttctctagataaacatcaatgttttctatctaaatgctgaaattaagaaatattttaaaaatagttttggaattcatggctttaaaaaaacacattcaaggcagcaatctttttttaattattattatactttaagttctgggatacatgtgcagaatgtgcagatttgttacataggtatacacgtgccatggtggtttgctgtacccatcaacccatcatctacattagggatttctcctaatgccatccctctcctagcccctcacccaccaacaggccctggtgtgtgatgttcctctctctgagtccacctgttctccttgttcaactctcacttatgagtgagaacatgcggtgtttggttttctgttcctgtgttagtttgccgaaaacgatggtttccagcttcatccatgtccctgcaaaggacatgaactcatccttttttatggctgcaaagtattccatggtgtatatgtgccacattttctttatccagtctgtcattgatgggtatttgggttggttccaagtctttgctattatgaataatgttgtaataaacatacgtgtgcatgtgtctttatagtagaatgatttataatccctctgggtatatacccagtatggggtttgtgggtcaaatgatatttctagttctagatccttgaggaatcaaggcagcaatcttaatagtgtagagttaaacctcttcaatcacgtttataaaaatgcaatgcttcttccaaaaaatggacttccattgttggctctttaaataacgagataaattcatacacttacatgcacatacacacatgtgcacgcgcgcacacacacacacacacacaagaaaaatgaactctggcccatcacagtactttatatgtattttaaaatattttgaacccaagcactaaacaccctgaaccctaacttagcattctgaacttcacagatactgtggagtgctttctgtgtaagattgaaagccattttaacagagttcctcctgaatcaaccccactgttccttgcccttgtgctagcttcctgactggtgtccagctgcatctactgttaggcttctgagaagcagcacctctttcctgatacaggtgatccactttgcagactttgcttgatgagagtccaactctgcttgtgcagcctgataaattctcctgggcttcacttcccacatagaggggggaactctctgtgaactgaatccactgtgcctcccccacaggattcctggtgaaattaaaaccaataatgcatcagaagcacatagcacagggctgggcacatggcctgtgctcagaaaatgttacctgctactgtgcctttactttcttatgttgcctcctattgttgatcatttggattgttagcaccaataccagcattgtcatcctgaacactcagcacttaccatttttgccacttagtcatgctcagcctctgccaccttgccttgctctttatacttagagagcatgccttgtgtccccaactttatcataagttgttgcaggatagaaaggaaatcacgcctggtagatgtaaaataacccttataaccagcacaggacagggagagagggctgcagatacctatgttgtttgggtctctgtaaagagaagctttgctcaccctgacatttacaatggacaggagctcactctgtttaaacactgtgtgtgcagaagctttcctgcctgatcttgtgtcatcctcgcagacccattttatctgtattttgcagggatctggggctggctgaggagaggtgcctgtaaatgagaaagccaggggtggaagtgcaccttgaacctactttatctcactcactcttacctagtgccaagtgctgccctaaataattcatatttaagttatttaatgtcacaacttaataattcatattaattaattcaattattttaattaatataatttaattaattgattcaatttaattcatttataattaatattaattaaatatgaattatttaaatctatatttaagttatgtaatgtcacaacttaataattcgtattatgtcatttaatgtcacaactgccactggtggtggggcaggggggttactgtttttatcccattttatggataaggaaacacttacctccctatctttgtttctttttttttttttaattatactttaagttttagggtacatgtgcacaacgtgcaggtttgttacatatgtatacatgtgccatgttggtgtgttgcacccattaactcctcatttaacattaggtatatctcctaatgctatcactccccactccccccaccccacaacaggccccggtgtatgatgttccccttcctgtgtccatgtgttctcattgttcaattcccacccatgagtgaaaacatacggtgtttggttttttgtccttgtgatagtttgctgagcatgatggtttccagcttcatccatgtccctacaaaggacatgaactcatcattttttatggctgcacagtattccatggtatctttgtttctaatgtccatgaattctaagtctctcctgctgggaagaacaaggaaaagaaggatcctgagaagagaaggagacgtggtgcaaatgtcagggacagagggaaggttttggcatgaagccaccttgggaaaaagagaggaagcctaaagaggaggctccgaagctgagtcctccacccgccgtgggaagaatggcgccgccgcacgtgcgtgggacagggcgatgccacctgcgctgggtgtgtgctgggaactcaagaaacaactttcagttctaatataacataatgatgaactcaacatggactcaagtctgtttttcctcctgctttatttttagttagggtacatgcaagctactcttgctctttggatccatggctgaatctggacaccagcagtgaccagctctagagtaaaaaaatcaggaagggggctggccacactgggttggagaatcagacttggggataccatgccatgaggtgtgtggcctctgggcaacaaaacaacaccagtttagactcatctccttgaaacagaaggaaaagccaggcttgaaaacatgggttagaacaaggaatcttgggccaggcgcagtggctcaggcctgtaatctcagcactttgggaggccgaggcgggcagatcacttgaggtcagaagtttgagaccagcctggccaacatggtgaaaccccgtctctactaaaaatacaaaaattagctgggtgcgtggtggcgcgtgcctgtaaaaccagctactgggtaggctgaggcagaagaatcgcttgaatttgggaggcagagggctgcagtgagccaagatcacaccactgcactccagcctgggtgacagtctgaagataaacaaaacaaaacaacaacaacaaaaaaacaaggaatcatggatgaataactaacttagcatgcagaagatgtcaacaataccgtgtttaacataccagctgtcttgatttagggccttccaagagttaattctctttcattctacattccctgtgaggtttgcatttctcaggtgttgagttagctttaaggagaattcttagacacctaaacctcacagagagacaccatcctacagccacacgccatttaagcgaactcatttgagaatgtttcaggcttgcatgattggagtgggtggggtgtggaccctagattctaagacagaaccttgcgcttaaggaattcagagccaaattacaaactggctggagaaacacctcaggtggatctaataggcccactcagaaagcagaagaaagctgtgtcctagagtgagcagatcctctgtggaggaggagcccctttgaaatgaaatgacaaagggtgaccagggttgagtggagcgtctagacatggaaagtggtagaaatgattacggtactacaaaaggatttacctcagccctggttcaatcctatctcctccaaagtgtcttatttgaggctttttttcccctctgaatacacatttctagcttcataataggaaagaagaagaaaaatgaatttatttcatggccaactttttgtggtgagagataagaaaaacagactttttaaaaggttcacatttagcatttgaagaaactgaattctgaaaaacgtgaattccttacctgggttcacacagctcgtttgggaggaaatgtgggtgaaagtacaagtctctggcaaagttggaataatccagcactctttgtgtaggaagaaggcacaataggaaaatgtgcatatgggcttctttttttttttttttttttgagacagtctcgctctgtcacccaggcttgagtacagtggtgagatcttggctcactgcaacctccacctcccaggctcagattatccttctgcctcagcctcccaagtagctgggattacacacatacgccacaacagccggctaatttttatatttttagcagagacagagtttcaccatgttggccaggctggtcttgaactcctgacctcagatgatccgcccgcctcagcctcccaaagtgctgggagtacaggcttgagccaccacacctggccggcttacttttaaaaaaacagtaaaaatatagaaagagggaacaccaaaacagtaaaatcaggttacctacaatgggacgtaagataccagtgatgagaacatgaaaacgtgaagcttttataagtaaaactgtaatattttgatttttgaagacatgtttagagtccacacatttttagaaaaaaattagtaagaatgaggaggagaaaaaaaaaaaactaaaaccaaaagcagactgaaaaaaaagaagatgattgtatttcaaatgagtaccagacaatgataaaggggaataaagaaagtgagaaagcaggaaagaggtactggaaagaagggaaggagggaagagggaagcaggggcggggagaagaaaatccaagtaacctgaaggagggaaaatccaacaaatttatgaacacagtatctgactttagaacctctgttttgggtagagtggaatgggaacaggagaattgcaaacaaatcctgactacttgtaataaataaattagtaattaggtaataaattgcattaataatcagatgaattaaaattcatctaatcaaaagaatttcttgtagtgtatgggcaaaaaaaaaaaaaaaaaaacaaatcctgtgaccgttttggatgtattgaaagaggagcaaatataaaaatgtgctgatgtttgagaaccctcaggttctcaaacaggcactgcagggttctcactgcagaaaaaggaatatgcaaatatgtaatggaagaaagaaacaagggactctgtggggatagatttgaattcgaggtactggcatgaagtcatgatttctaaaatatgcgtgcttatgtagatatattttgtgtatatttgcttgcatgaatatattggaaatatacatatacatgtatatatttcttctctgcccattgaaagggccaagaaattgtgagaggaaaataaaatctcagaaccccaaactccctatgccaaacggaaagttaagcttaagaactaagcctctcaaaaaccgcctagctgtaatttcacacgcttactttgtcttatgtaaaatgcagatttactgagcccgagatgaatgcacaattgacttttcctcccactcctttctctccacatgtaaaatgtagatccactgagtgccaatcagagcctcacaagcatgaaaccacttgcctcattgcctaccctccccctggccctcctgctggttctttccactttaaatattgaagccctctaaaccctctggaaaaagcacagatcctactgtgacttgtgtttctttttcctaggtgcatcctcaacgttggcaaaataaacctttgaatcgactgagatctgcctcggtcatgtttaacaaaaacaaagacattcagtagctatgagtactcctagagctcagctcttcactgcaaatgccatcccccactaaaaggaacaagagctcttcagaggaatagctaattccagggcttggggcagggtaggtcagcatgagctggaaaggaagaaagtagcttatagaatgagagaactatgttgtaaggacacaggagccaccaacggagatcccagtggccaaattgtggacaactggaatcccaaaataatgcaagtagaataatgaactattgacaaataggaattcatgaatacacaggcataaaaagtaaggagagagggatggatcctatagtagaatgccaaaatctgactgacagatgtggaaagcatgtcggagttggaaaatcagcattctgcaataatcatggcaaagactggatcaggcaagtattgtcaatgcgtgtatttaaatctaaagggatttttttttatgagaatcaggatattttcagggtcttaaaatgtcatcccattgactgcttattagttgcaaaggagagaaaaatagtaactcaacagtgaagatatcaaactccactttaaccaagtgatcaatgttaacatcaccaaagagggctggatggccgttgagtgtccccagatatggtactctgagaaggacacaccattccctatgtagtatttcagcatggagcacatgacctgaatgtaatcacacacagaaaaaaatcagagaagcccacgatgagaaatgttctattaaaataagcaggggcatgggctgactatattcttcaaaatgttaacatctcaaacacaaagaaagcctgtggaaatattcctgattcaacaggggaactaaaaagacaagacgatgaaatgcactacctgataccagagggatcctgtactgcaggaaaaatgctctaaaggacattactgggtcaacggacacatttggaacataaatggtagattagataaaacatgttatcaatgttaaaataccaaagtagataagtgtaccatgattatgtaagaacatatccttattcttaggaaatagcccaggaagaatttaggcataaaagggcatgatatacgtaacttaccctcaaatagttcagaaaaacaggtacgtgtgtgtgaacacacgtgtatgcatatgtgtgtgtgcacatgtacatttgaatggagagagaaaaaacacaaaggcaaagcaaatggtaaaaatgtgtgtgctaaatgattcgtgtctgctcttcatgttattttcatttttgtaacatgccttttagttagaaattattttcaaataaaaagtttgaaaatgatgcttgtacacactgaatgcatctacaaatggctgtcgtgaaacagcccattgtcgtgatgttgctgagaggccatcattaatcaatacatatatattaatatgtcattcctgatgttttacatcacattttaattgtccactagagctttgatttccaaaccttgccctttaatgggttgtatctgaatcccctaggatgcttttaaataatagaaattccaggaacccggaacctgatatagaaggtcttgtggggggctcggaatctgtttttcaaacaaccactggaaagagaatacatccatgcatatacttatgagcaacatgttctttaaaattccacccaatttttgtgtttgtaaagtgacattccaatcgtgtcagtccttcacacttgcactgtatacttaatctcttttgattctttcctatagaccatcacttcaccctggactgcccaggcatcatccactgaatatcccccgaggccaggttaaacattggttcaggacattctattccctacatccctcactcagtcgtcctgctttcactgttctataggctaccacatgtatcagctctattccccttctgatcctaatcacccctgggatcaaatctgagctatcatcacaacctccacgtttcacctattagagaaatgatcctcaggtagaagggcttgttatccttccagacgtctctgtgattctcaacctgcctggtcacctttcctgtttgttccttcttttttatcaaaacatctttatatgttacagagagatattacacacagcattttgtttcagcacagcaatttgttcatttgatcgcatctaactgaagtatctgtcaaggatgagataaacgtggtttcacaatggggactatcacccaacctggcagtctcacctctcaactgccttctgggcctgcctagataaaagctgttgttctgtgctgtaaaataacaaaataacgttggtgtgtttttcctccccaccaaatagcccacagccattctcctaaaattgatgacgttttctttttttgacaccttctttaactggttcagttacaagcttatctgattttgatatcaatgtctcaattccagcttaatccttaaataagtaatgaatgaagcaatgactcaaatggcatcaccccgttttatggacctgagcatgtttcacacagtgcgcccgctgctcaacctcatgggcactgagttttctgtgttgtagtgaacaagttttcagctaaaactaatcaaggaaagatcaacaggctgccctacaagaatataaactacaaggaaattttatgatgtgtgcatacacttgttatctaaatacttgtttaaaaaataatagaaggttcatcaagtctcaacatcttactgaatcaataaaaattcaaaatgcctgtgttttatgagtgaccaggagtgacctttccccacctctctacccaaggctccagggtaatttgaaaatgacagctctggatacagtagtggttctccaggtgtagtccctggacaaacagcatcacccaggaacttgttagaaaagcaagttcttccttccacacgtccacgtgttctcgtcatttagctcccacttacaagtgagaacattcggtatttgatttttctgttcctgcattagtttgctaaggataatgacttccagctctatctatgtccctatgaagaacataatctcattcttcatggctgcatagtattccatggtgtgtatgtatcacattttctttatccagtctatcaccgatggacacttaggtcaattccatgtcttttctattgttactagtgctgcaatgaacatacatgtgcttgtgtctttataatagaattatttatattcctttgagtatatacccaataatgggattgctggggcctattggacagtagagggtgggaacagggagaggaccagggagaataactaatagatattaagcttaatacatgggtgatgaaataatctatacaacagatcgcatgacacacgtttacctatgtaacgaacttgcacatgtacctctgaacttaaaagttaaaaaaaaaaaaagaaaaacaagtactcaggccccacccctgacctactgaattaaaaaagtctattatgaggcccaacaatgttttaacaagccctcctccaagagctacatcattgtccaggtgctggagatctcaaggctgatactagcttcacgaattctttgaccaagtgaaatcaaataggaaaagagaatatacataagttttctaaagtttttcttaagcctaaactatgtgtttaactatccaattaaagttgaatattcattatttttcctgttttttgaagttattatggagaacatttgctgcattctttatttggctggagatgcttatagtaaccaaggctgagttatggtgcttgcctgaggtgcaaattcaaaggcacaaaactcataaatcaagatgaatattaatgcaatatttaaaaagtcaacactaatccaaacaattatgatgaacaaaataacaaaattataaatggagattaggccagcccggaacttttatgactaaccctcttacatcactctaatcctggccttgttagtgataacctcatactatcatcaatacattgtgataaccttggaagaggagtgtatcagttgtgtctcatatatgctcattttttcctgagtgttttgccaatggcatggtcatagatggcagcgtataatgggagcagagaggactggggaccagctaagtggagcacaggcaaagtaatgttccagaagcctggggaaggtgccatccggggggacctaagccaggatttgaggtagacgtgggagagtagaaacaagtgggagactggaaacagctgggagtgatggacataactatttgccaaatgccatgatgggacagcgattaaaacaagtaaaaagtcatggttaagttcacacaaataacaggagacagaaaaagcctgtgagccataaaattaggcaaagctgaaaggagggagttggccttgagaccaggaaagaaagtgggcctgcactagaagagacagtcccagaaggtagcatgacatatataaaaagtcaagatgccaggcatagtggctcatgcctgtaattccagcactttgggagtccgaggtgggaggatcgcttgaggaccggagttcaagatcagcctgggcaacatagcaagatcttgtttctacttaaaaaaaaaatttaaaattagctagctgtggtgtctcagctctcacctgtagtcccagctactggagaggttgaggcaggaggactgcttgagcccaggagttcaaggttgtagtgagttataatcatgccactgtagcccagcctgggcaacacagcaagaaaacacaaaaatacaagtcaacagctaggacatcgtttggaactacgcatacgtatatagatctgcaaccagcttttttcaattagcaatatattcagagaaaaaatttgtatcagaaaatatggtagtgcttcattttaaggcaacgccatggtatctgtattagtcaggactttccagagacagaaccagtaagaatggatggatagagatttgatacacagaggattgactgataggtagacagatgacagatagatggtagatagacagacagacagatagatagatagatagatagatagatagatagatagatagatagacagacagatagacagacagatagataatgtgatttattttaaggtatttgctcaggggattgtagagcctggcaagtcctgattctacaagcaggttggcaagctgggtcccaaggaagagctgatgctgtagctctggtctgagggcagtctggaagtagattttcttcttcctctggggatctcaatcttcttctcttaaggccttcagctgattggatgaggcccacccatgttatggcaggtaatacactttactaaaagtctacaatttaaagtttaatcatagctaaaaaatagcttcacagtaacatgtagactggtgtttaagcaaacactgtgcaccatggcctacccgggcaacacatgaaattaaccaacaataaccatgaaattaaatgtaaccattacagtttagccacagtaatttctataaccagcttctgattgatacagatttttccttatttttccattatcatgaataatgatacatacaaataaaaacattattttatatgataaatgatgatatagattttatatccatatatgacatgatactgttacatgataatattgtattattttaacatgataatatagatatttctgttgcatacattcaacaaagtggacctgctgctcagaaggtatgtgcacttaacaaatcataatggatactgtcaaactgcctcccacaaagcttcattccacaacagcatgtgagaaagcttgtttccctacatgctcttggacactgggtatttccaagaatcacaatatttgccaatacacttttcatgagcatagccaagggaagtgggtagaaatgggagcaagagcagtagtggctggagcaggcgggccctgggactttctccacacagcaagcatgctgcccaccatgagacattagaatgattcaccaaggcagtcaatgtcttaaaaacgagaagcacaaaagaaaggcattatgtcactcagggaacattggcacaattttctttcttgagatcccagctgatcctgcctcatccttctgcagaaattacaaaaggagtcaccccagggggattctccttcaaaatgttctttcaaggacacttttcgaagaggaagggaactggattagaccactcttgcatttctacacagacatacaagatgggaaatttataaagaaaaagaggtttaattggctcagggttctgcaggctgtacaggaagcatggtgctggcagctgctcggcttctggggagaccccagggagcttttactaatggcggagagcaaagcgggacactttggtatcccatggccagagaggaagcaagagagaaaggagggggatctaagttccttgaaacaaccagctctcatgtgaactaagcaagaactcactcatcatcaagaggatgacgctaagccattcatgagggatctacccccatgacccaatcgcctcccaccaaaccccacctccaacattgggaatcatattgcaacatgagatctggagaggacaaacattcaagccacatcaggaacctgcctgagctgctgggaactcaccctcatctaccctctagccagaagctccatgtggcaggcactgttcacacactctatgtgcattgacctaaatgagttaagtagaatgtttctaacattttagagatgaggaaactgaggcacaaggtattcaggtattgactacgatcatacaattgaaaaattgagaagccaaaattcaaacctatatggattgacctggggcctgtgtgagaggttccacttacatctatgtaaggtttcaattgaagaaagggctcaaaggcaagaaacatgagcaaactgctgctctcagtggcgccagaagtgacaccctcggactaggaatttgaagaaaagctccagagtaacatgccaggtacacacacatgcacacaggtgcatgctggttcatgaaagcacccatacttttcccactcaaactgccatagcatccaaagtctaccattagaaattcatgcctattcttcactaccctttcttcttttaaaattcaaattccacatcatgtcagattacagcaatcatcagtttatttgatccctgtgagaagatgatcagattcaaacttagggataaaaagcaggagggtgctgggtgaacttagaagggatggtgctaagagaaacatggagtgctaaaagaagacccacagatgcattccaccactttctggagtgttcagacctgtctgaggatgtctggcagaatggtggggtgcagctgcctggagtcaatttgcatgcaggacccaggaacattctggaaaaaagcatgtgcagatgtaatacaaaggtaagcagataaggctggcttgaccaagtgcctgcttcctgaactttctgaatgtagcagggtctgttttcactacagatttcctaagacatctgtgcgtaggtcctgccttgatgatcctctcatggcacacagtgaccaagtgggagagaagcttctccacacttaagaaggcaccttgggtggagagaactccagaaaacagactagcctcatcaccccaagacccagagatgctgtagagtgctggtgtgccagtggtcatgggcagaaggaaccagggcacgagtgctggtgcccaggagagccagggtacctaggagaagaggcagaggtcctctgtgaacaggctggtggtaacagaaagcagtgtttgatgggtgtatttgagagcaccatcattcactagtaaatacttgctcagaaatatgtgagggagacttaaactgagaactagagatgaggaggtgaggtaatgtcatctaggggaggtgacagcaaaatgtggaaaataattttcctattattatgagtgaattgtgtcccccatgtcccaaggtttgtatgttgaagcttagtaccccagaaagtggccttactttgaaataagatcattgcagatataattagttaagatgagatcatactggcttagatctacgccaaaatgactgatgtccttataaaaagaggaaatttggtggatgcagtggctctttcctgtaatcctagctctttgggaggccaaggtaggcagactgcttgagcccaagagttcaagaccagcctgggtaacattgcaagaccctgattctacgaaaaatgcaaaaaattatctgggcatgatggcacatgcctgtagtcctacctacttaggaggctgaggtgggagaattgcttgagcccagaaggtcaaggctgcattgagccatgattgtgctactggcatttcaacctgggtgacaaagcaagaccgtgtctttttaaaaagaaaaaaaatggaaacatagacatgcacacagggagaacaccatgtgaagatgaaggcagatatctgggtgatgcttcataagccaaagtaatgccaggttgccagaaatccaccagagtctaggagagaggcacacaagattcagcctacagcttcagaagaaaccttccctgctgacaccttgatctcagtcttccagccttcagagctaagagataatcaatttatgttgtttaatgcaacccaatttgtgggactttgttacagcagccctgggaaatgaacacaatgaggaatgtagctgcatttgtacccacaggccaatgtgacctgggtcagccaacatctgcaactagaagctcaccttgaaaatcgatgctccttaaactcatcaccaggacctgattatgatacagtcagccaactaattactgccaagaataagaaataaaagttttctgtttccaccagagtaagaaggtccagctgttccattaggagcagtgattaatccagttttgaagagctgggtatttcctgttgagctaggtctttcctctggggaaattcttatttttcacaaccaaggaagaaagtcttattcactatatggcaggaactcaagaaacatggtattgaggatgttgatgacagagatgatgggagtagtagtggtaaaaatagaaattagccatttcttcaataatcttcactataagagttggatggagcacaaccatcttccatggaagttgttcctgttttctcatttcaccttctgacatcacttgtaaaatgtatattaagacagcagcatactattttttgaaatgagacacttaaaataccctgaatcaagtaaaaatatgaaaatctttaaattaataataaggacttgctggccttcagaacattcatttgagctatttttgatatgtgagaaagttgtgcaatctcgtctcttgtaatgtgactttcactagtgtattagagaatatgttattccaatttgcaaaaattatgtaaccaagaatttatttgctgtctttcatatgccaagcagtgtgtaatggagaataaagaaactcaatacgtggtttccgctctgaaggaccttacttgttaagcagggcaagaccttaagacaagaagcaataatgggtgaataaggtgaggtgatgaatttttcaagactaagaaagctcgaagaaggaaatatgcagtccttggagagacaggacccaaagcaacctcacaaaaccagtcctgttttgactgaagagtctgtctggcttagacaatccttttcatcttttggtttctagtttggtacagggaaaaatgtccttgatacgccaaagcattctcatgagaaatgcaccaaaattttttaaatgtgcatttatttgatgatcagcaaatgttaggtcaattgtggtaaaatgttttctgggtcgggcgctgtggctcacacctgtaatcccagcactttgggaggccgaggtgggcagatcacaaggtcaggagatcgagaccatcctggctaatatggtgaaatcccgtctctactaaaaatacaaaaaatcagccgggcgtggtggcgggcgcctgtagtcccagctactcgggaggctgaggcaggagaatggcgtgaacccgggaggtggagcttgcagtgagccaacatcgcgccactgcactccagcctgggtaaaagagcgagactccgtctcaaaaactaaataaataaaataaataaaaaactttttctgaccaaatggacacctgttggttttgcctactcagcacccatttccttgttgttgttgttgttgttttaatgcaaatattttcctttagaaaccacctctcacccaccctcagactaaccacattggctgggactgatcccacttatccctattttcctatgggccctgacagcagcctggccattcagagcagtccatgcctcaggccagacttgggctcaagaattggcatagctttgtgtatatggagccaagacgtactttgaaaagtacaacgttgtttaataagtatttaagtgcccttttcatctgccaatcaatttaaaataaggtattgaactactagtaaagtctaaattaacgtcataatattaaaaataaaacgaatatgatattcaaaaatatatcaatgtcttgggagggttttaaacaagcgttttagaaatactttagaaacaattatctgggccagacagatatagtgctttatggactgagttgtaggtttatgatccttacattatccaaagcacctgataaatcacagggctgtttcggctctttccaatggtcactgaaaactttgagtagatataattatcaatgttatgcacattttctacatattgaaagcactggaagctcttcctacataaagtatcaaaatatgaaatagtttgaaaaatgtgtcaggcttcattttatttgataaaatgctgtatttaaatataattaaaataaaaagtcaaaaccacattaaaactgtgtcaatatttcagcaaaaggtgattttttttcctcaaaactcagaaatctatcccatctcaactgatgttccacgggctatacagtatatttcctgtatgtaaacaagtaaaaataacaccagcacttctccagggcttctgtgtcaatatgttatcagaaaatatcacctatctctctcccctcttgggcttattaaaatgaaatttggtaagttaaatcaattagatgaaaaaatacttttttaaaaagttcaattttatattttaaaattagaagtaaaaaaactcatattgtacttttgctatgttgaaagcattgctcatttcttgataatgaaaagggaaacgttacatccagttgagaggaaaaaaaaaaaaagatgctgatggtgatgctgacttaaaataaataatcacaaatagccacgcatttgtagccctgcacttccagacttcccttcatgaaagcccttgggattggggccatttttaaaggctctggagtgaccagaacattagctaatttcagagagtacaaaatgaaatactatctatgaattccaataagcatcgtctctaaagatgacttctcagaactgcggaactctttatggagattttagctgggatgatggtgcttgtaagtaatctcaccccaaagcagttcattttcaagaagacacttacatcactaattgttctcactcagagagctatttaatgctcccagatcctccagcccctccccactgctctccttcgttccaatgctgtcttgtctcctaatgagaagcctgcagcatctatcagccctcccagaagccctgtactcccacctcctgcatgggaatgtataactgcagagggggctctgagcaacaaatgactcttccttagtgaggaacgagatagactaagagttcatggtaagaaagctcagaaagtataaacagagcaccttaaaaaacaatgaccagcaatttagtacagatagaagtaacagcgagttagtaagctctaaagcagaattgtaaacccctattcttcaaaaagcatagtacattctaaggaaaaaactgaattatctaaacactctagaaatctaaaaaagacaactctaaaccaaactaaatgtttctaccccaaagaaaagacaaatgctgatcttagagagtttacatgctcctagagatctttgaggttaaaaattccccaaatgattcattttgaccacctcaattttggtgagaaaggaagaagacagcttacgatattgaaattaatgtgcatggggagtattcatcctgcatggaaatcacgtcaaagaacaccttaagttgttaatttcatagacttaaaatactttaagcttcttagcatttataggaaaaattactacatttcatgataagctgaaactaaacattttcaagaattttcttgtatgaaaagaggaggagattaaaggtatctttcttgggatcatggaaagtcatcaaattgatacaaattgagtgttaactctttttctgttccttttattgtatatcccccagtcatttatcctctttgtggttcagcgcccttctttgtggaatcaagctgttttgaaagtgctagattctctacccaggaagatagtgtacattctaggagtaagtgagcccccactgagagatgtgtgaattagccctactgtgggatggcggacaatgtgtaaactctcctccagtacacacacacctagtaatttagataattctattagccatatgttgctagagatttccctttcccataagcaaatcacaacgaagggaaaggttgtttgagcatcagccaaaaaaataaaaataaaaaataaaaaaagaatgtttattgatggctttcattgtgctagattctgagactccgtgagatagcccattccccctgggttttacccgccagcccgggagctatgacacaaattccgggagatgaactgagcagcctcagctcagtgttggctgtgaaggcaagaggcacatgctctaggaattccagaaaggaggtgatacgagggaccgggctggacagcaaacagcattctgcagaaattatatgacttttttttaaagacctttttatctggaaataatttcaaacttacaaaaaattacaaaataccacaaaggtctcctttatgtcttcaccagatttctcaattattaacattttgttatttttgctctgtcattttctaccttatgaatcatttgagagtaaattacagacaagatgcctctctactaaacactttagtgtgtatgtcctaagaaggacatgctcttacataagctcagtgcagttatcacagtcaggaaatgatcattgacacaatactctcatctaaccttggagatgactttttaactgccccttttgcacagtttctcctattccatgggtttctgtgtattcaaaacaataaaaaacaaccctcatttttatttgggtcttaagagattcccaacagggagagaggtggacctcaaaccatccaaacctcagtccaaagagtctccaataagatggcattcaactctcaaaggaaacacattttcaactcatcatttagccagcttcatttctcaaaattccctctgacagcaaaagttttaacagttaagtttctgccagaagagttgtctagcagttgttcccgtcccctgttcctctgtgccagcttcctccccctccctgtctgccccatgtctgacaccgaagccacatcagacgctgggagaagaagcagacacacaccctgtcaacacatctttggctgcccgactctcagcacagtagtggcggggggtcaccagcagacaggatgcttcccacatggggatgatttaatccccagcgttttcatccagtgcaagagagaagcccgctgcttgtgggccaggtgatgggaattaggcaggagccgtggtaagaataaaggcgctcctgagtgacaggcatcacccctccttcactggggttttgccactgtaaggctcaaaatacccgacaacaaaaaacttcagaaattaatctgggattttcattttaaaaagactttttgagcccttttaggcagatgctgaaatcatttcaacatgctcttccataacaaggttcagtgttattttaaaaaattacttggagcagggtgttcatgcttggtaacagatacattttaggacttggctcctgggatggcctgttaaccaaatacaatcatgtgattattctaatgacacatctgggtccttccagaaatgtgaaagaatgaacaatctaataaccaattcctggaataaatcacatgtgcttttccagaactttctcacaacctaatacagttttcttccattaacaaaaggcataacatttagcattttctctggcaaactgaaagcacaaagaacccacaaaaattaaaaaagtaagcgcagagaaatattttatgattgttttatagttttatttatgattagttgaaatgagaacttgggtcttttttttttttttttttttttgaaacaggatctcactctcttgcccaaactggagtacagtggcacaatctcggctcactgcaatctctgcctcctaggttcaagcaattctcctgtctcagcttcctgagtagctgggactacaggcatgcactaccatgcccagcaaatttttgtatttttagtagaaacagggttttaccatgttggctgggctggtcttgaactcctgacctcaagtgagctgcctgcctcggccttccaaagtgctgggattacaggcgtgagccaccatagccagccaaagacttaggtctagacactttgctcaaaatgcaacccaaagattagcaacatcagcatcacctgggatttgttaaaattcagactcaggtcccaccccaggacccctgcatcaaaatttggattttaacaggatgtctgagtgatctgcacacacactaaactgtaagaagccattttttaaacaagtgtgccatccaggcaaggctaaaagaagccaccagagagtgaagaaaatcccaacagagttcgcagaagaggtgggggccacagtaaacttaaggagtatcagtattttccaaagaaccaaaaaactaatatcccacttaatttatccaaaatagagttaccagatatagcaaataaaaatacagggcacccagtcaaatttaaatttcagagcagcaatggacaattttttggtatgtcccaagaagcatttggacacatttttaccaaaaaattatttgtagcttatcagaaattctaatttaactgcacattctatattttatctagtaatcctatttcagagactctagattaaaaagcaaattgcaaatatgtccttctgaatgaaggtttccctaatagactttgacgaactttgctaaaagaacgatagccttttctttccttagctatttgtatttgtttttgtcttttttccttcctttctccttccttccttccttccctttcctttcttttctttctttcctttcttttctcctttcccttcccctccttccttcctttttcttttctctttcactccttccttccttcttttatacccgaagttcatcttatttctcatgtgttcctgagactgtagctaacctattttattctcttaccagaacccaggcaaataagtgttaatctggaatagttctacttgttgtggcatgagaactgctcacaactggaaaaaaatggtttttacttactgggagcatcctggctaaatttgtaaacgcgtccctccgttaccaataataaacgacgtaggactataccatccaaatagctaccttccaatattttaaagtgcttaattatgaaatgacaattctaagaaaacttaataaaatgtagaaaatactatacagttcaaaagcaagattttaccttctaagaacagaatgaaaacaatcaaacaaaaattctgaggcccagtgatttcactcaaatgagaaacacagaaaacaatgagtagggccaatgtgcagtaaaaggcaccttacattcatggaaaaggaaagaattcaagcatgtgttaaaagggcaataaaataaaaaggagaaaaaaatataaaagcctattaagccacaagaatgtttcttttgatgcttatttttgtattaaatagcaaaaggataatgccatcaattaaccatgatcttcataataaaacagaatattttacagtcaaaaaaaaaacttggaaaacccagcttttagttcccatgcaacatcctcaaatcactagaacaagtgagttgctaattttcttctctgttacaacaacagaaataaaatctagcagagaacaaaacagttaccatacccacaaccaacatctctacgcatcttttttttttccagctgctattcatatcaagtttaagaagccaccccataagtctcccagaagtctctgaaaaataaaaataggcagaaaagatgattactgaggactgtgagtgggaaaaccatgtactcaatttgttcccaaagtttttcaagaaagcaagatgattttagtaacatatttgcgctgattcctctaaaaggaccatgcaccataatgaatgccgagtagtggagttggtggtgacagttgggttggcattcttagacccagatgttctcagccagcatcagctttgatctccctgacgacctgcatactcttaagatgctggtttagaagattttttgcagagtggaaaataccagggaaagatgcacagaggagtgctgaaacctaaatgctgccttaggttggtcaattgtaccatcaaaggaattgaatttctcagagataagagttttgtgtacactgtaagatgaacttttccattcctgatcactagatggtgtgaaggagtccagaatatgccaccccaaaatatgccactttagcatgagtattattttgagctgaaggcaactgcgaatcaacagaagcagggaaagttctctgccctccccttatctgcctaaaaacagggtataaatttcctcttgtgaaagagtcatatattccccagtccccctggaccaggatgaaaagaatgacctttatcactgaagaaatataattgacactgagatgagtctgcataaacaaattttaaaattatccttaacttttgtattagtcagagggacagaacgctagagggacagaactaatggaatagattagattaatagaaaactccattaactacctgacctccataagcccctcctttaactggaggaccacagtgacatttaaggtccccttggatgaacgtcagttcacagccagtgtccagtagtcctcaaaaagtctgatcatttcccttttcccagtgaacagttaaccctggtaaaagactggaggtctccttggggaaggatgggagaaagagtcactgcataaatagttggtaatgtagtgctggtccttcctcaaaagaacccagactccccttcattcaaggggttctgggtctgtaaaccgtctcaagtctggaaattgattgaggggctgtgattctccatttttataattcaaattagactttcatccatttgacctagaagttatccgcttgtataaattaagtaggaatgcagtaggcttcctatcaatttcacttctaggaacaccatgattaattacccaatgccagagctctacatgagtcagactattctgattgctgctttgcctcggctgtccgttacggtagctacacccaccttgtctttggtggttgagtgctgccacttggcccctgccacctgaagatccaattattgccactgtatttaaattttgtagttgagtgactgtggttccccgttagatctgacatacagaaaagagcaattacagggctcttcaaagatgcaggtgctgccctcacaaatccattttgcaaggcatcggtcaagggtatatttttctggaccctcccagctgggatgagcaggtctaaagtgactaattcactccaccatcccaatctccctaagcctttggatcccttcctctacattaaaccaagagagatcaggcatttccaccttgctcacaggggtcgttttttaatccaaattttagctaaccaggcaaataaactattagaaccttttttaacttcccgagctgcagcattaaatgcagagtccttacttagtgggcccaaatcaataaattcagcctgatccaactctgtgttccttccaccattatcccacatccttaatatccattcccatgcctgttctccagatttgtttatataaattagaaaactcaaacagttatttttgagcatagtacaccccctcatgggtcacactctcaacctcacctctaggggcctgcttggactttagtctagttacaaatgtagaagcaaacaggggtgttaggggtggctcctgaggagaatcaacattattttgcctggcaactgcctcagaggaggccatcactgttgcctcaggcagtgcagggtttatctcctcagacaaagggggaaaggctgatggccatgatggcatgggttggggagtggatgttgccactaatggggatgaggaagttgttggttctggcaaaaaaggctcatcagagtttacaaactcagtgtccccagcttcatcagggtccccccacatgtctccattccgagttgcaggtttcctttctttcccaatcagtgccctcactttaacagtagacacctggagagactgtgtatgcacctttcattgcaggtcagacactcgcatgataaaagcttgtatctgtttctccacaatttcagctctttctctacaggagataagactcttactcagggcaatcttagcagatttgaggctcagtacctgcttctgaagttgggaactagaatccctgagttcatcattttatttcatcactttgtccagcgaacttcagagcaaccaaccagcttcattctgttctttggttctccacatatgatcaaatgcattatgtatagagtcactaaactccttgcctctcatgagtgataaatcaggagtgtcaaatgcatttattttgcataattctctaaacagttcacaccaaggactatcagtgttctccatactattagaagtagagtccttagcatgttttgatctaatcatattaagcagtcagctccagaaatcccaaaaccaacgaaagaactccatccttaatattattttcctctagaactactcctagtgccaaaatctgtattagtcagggttttagtcagggttctccagagggacaaaactaagggaatatatatatatttatggagcttattaaatattagctcacatgatcacgaggtcccacaataagccatctgcaggctgaggagcaaggagagccagtctgagttccaaaactgaagaacctggagtatgatgttcgagggcaggaagcatccagcacaggagaaagatgtaggctggaaggctaggccagcctctcttttcacatttttctgcctgttgtattctagccacgctggcagctgattaaatggtgctcatgcagattaagggtgggtctacctttcccagcccactgactcaaatgttaatctcctttggcaacaccctcactgacatacccaggatcaatgctttgtatccttcaatccaatcaagttgacaggcagtactaaccatcacaacttcattagttttccctaggaatttcctagttacttttccacaaattttcagtcctggaagcccaattcctctttcctttgtccaggtactttttcgcagtttattactctttgttaaaatggtatataagccccagagtctaaccacttctttgtgttgtcaactcctgtgcacacaaaaatattaacatcaataaaatgtatatgccattttccctgttaatctgtcttgtcagtttaatttctatgccccagttactaaacctaaaatggtagagggaaaagtggttttttcctcccctacacgtgacacagggctgtaaaatatgttcaagttaatttaatctgttttaaggtttaatgagactggttttattttagagcacaatgaactttggaactctttcctctcagttgcctagatgcaggtatgacacatctgagaaattatccaggaattagctttatcacaagaagaaaaagtcaaacacccgtgattgttgctttcccacaaaacaggggtgcatcttagaatttctgcacctctgacttggcagaagcctcagcttcatgaatagttgcaggaggtaagttgatgcaatgggatgctgggcaggtctcctaaacccaaatctcccgcctcctcatgttccctgtaatttccataatagaagacaacagttttcatttcacaattattgatagcaatcacaaaacaatacctgtgagaaatgttatactaacaatcccacattcagttttcaatggttaagagacatcttttccagcaaaagatgtggatgagactgaaaaggatatcacagatggaggagacaaacacttaaaatggggtttagccatgatggaaataaatttcacctacttctgagcttgacaggtcaacccttactaggcttcatccatcgacccaaagcagctactcagatgttactttccaagcattgttttttggttttttttttttttttttgtgaaaacaaaacaaaacaaaaaaacacctgagttcatcatttatttcatttttttggtaaaacaattcatttaattcttgccttcaaagagcttttcaactggaggaggatgtaaagaaaaatgcataattatgtagagtagaaacataaatacattctagcaatttacagtcctttagagcctaaagtttagaaatacatacacttcaacacatattccaaaaatacttctgcaaagaggcagccctctcctaccaacagctactaaaagagtccaccaaatgtctagatataaaaatacataatcatacaattaatgaaaacttattttgcattgtgtaaaatttcaagtatctatcaaggttggttctatcattggtgtgcttgaattggagggtgagcaaggctcctatgttgcacctgggaatgcacctcttaaatctgttaatatgttatccttctctttttaattttcttaaaatttgtttgttgaaaaacctagagcatattttctacattttgcttgttgctgactgtatccccatggtgattcttgatagatttatttttcccttgtgttttctacagccctagtagtgagatctagaggctggctaagatttagcttagaaggtttgagtgatagtatatcaggagatgtgctgtgtccttcccattgcatccaactggagacacgtaatatctggttctctctctttttgtgatattggcattgaccattgggagtaggtgatgccagcttcatccaaagcttcccttcagcattttgtctaacagttttagcagtcattgataatccttgcctagactcattgtttcattagtggttacaaagtggcggcattctagctccttctaatgcctcctttgtttataaattcttttgaaaaagaaaaaatttatctcctcaactattttggttatcccaaggtacagcgctttctggaaactggggataaatgcttgattctttacctttatttgccacttttcagaacaatgagttggttcctggcatcctacaaggggagtgcaaagcttttaaaatatcactataaatgcttggattttgacatatcctctatgtttcaatacattgcagatattattctttgtttgtttgtgttgaaataggatcttctgctgttgcccaggctggagtacagtgctgcaatcataactcactgcagcctcgacttcttgggctcaagtggttctcccacctcagcctcctgagtagctgggactgtaggcgtgcaccaccacacccagctaatttttcattttttattttttgtagagacagggtatcactatgttgtccaggctggtcttgaacacctggatattgttctttttagatccatctttgaatatagttttttcatctttggccagtaggaggctttacctgttgagtcctgtgtgttttgagtcttttcccattgcctaagctgtctttgaaggcttccttgctttctggtatgataagatgttaccacctcatcttgaacatttcttgccccaggctggaattaacctttttttttttttttttctctcaaggaccctggttcctttcaataaaaaaggcatttggatacgaaagcatggatgcttgggagctccttgttcttgggggggttaatcattggttctagaccttttcagtggacacatccagaaaacgtttttaaatagaaatacatcaggagtttataccaatatttacaattcaagttaagagctacagatttttaaatgtagtgtctttgattttctatttaattatcttaagtcaaaaaacttgatttcttatgacataaatataattattttgtgcttttcctggttaatgtaagaaaaaaattttaagaatccataccaacatattattaacaatataactactgaagcaatttaatattttgttgcagttcttttcgtcctgaggacatgtcccactgcagatatacaaccaaatagacaagagtgtaaatcacttcaaataattcctttctacatggttaatactccgactgatttatttcattttgtttttgaattaagggattttttttgttttataattttgtcaaatatttgtatattttcaaatgaacaaaacaaagcaaattcaggaaaacctcgtttccaaatctgttgctttcactgtttcctccctcctctaatgattcgcttttattaatttgttgtttcctatcctactgtcattgaatgtgttaaatattaaatacacactcacttttcttaggcaaaaggtagcataatacacattctaatttttgtcttactttttgcacttaagaatatattctaaagattaccccttggcagtatataagttagtctttcatctcttttagtagctacatagtagttcattgtgtagatgtagcatagtttattcaatcagtcccctcctgatgaatatttgggctactgccagtctccttccactgccaccagtgccacaataaataggcttttgcatttttttttttcatatttggtagtctatctttgggatagattcctagaagtgggattgtttggttaaaagataaatagagctatcatgttgctgaaatccctgcctagtggctgtaccactttgcatttccaccaacaatacataagaatgtgtgttttcccaagagaatattttcaaatttcaaagtattcaattagaacacccaccaagaaagatctttattaggagaatcaaactaaagctattgatacttaaaatacacctaataacaacaatttttaaagcttttgacaggtgcttttcatgaatatagacctaagaatttgacttagaaataagagagacgttgtactgaaaagatagaagtagagagaggagacccagtggaagagtagaaaagtagagagtcattggcttaaagagttgaaaaatagatccttatctcagccctgctgtgagctaggtatgtaatctacacgaaattgcctgccactctgggtttcagttccctctgatgcataagcaggaggtgaggtttcttacctcaccctgctgtcagttgccttccagatctctcatctgtgtgcctgcatgcagaaggcgaaaggaatgctacaggaagccatcagaccagggtgggaaaaactgggggaagccccacttccacgttagaccaaaatcaaatcagaaccccagacactcccaagctgggtgttgtttgcaaaacattgttctcctgggacctgggaccaaggttgggcagagggtggagtcttcaacatttaccaagttcctgttttaggctgggcatgctgtagctgcctggcattcgtcaacttgcttttgtccctgtaatctgttttgcaaataaagacacatggtctcagagagattaagtggtttgtcccaaatcacacagctggcagcagagctggggttaaagtcttcttattgctttgtacctgtgagccctacactgctgcagaaatactacaaagaatcggttctctcctagacgacagaggccatgtactgaacacaattagttaaaccctgtgtaaaactggagccttctgggcatgatagagaacttccagctgtctttgaacaagacagctttgtcccaagaaagctgtcaaatgactcactgcctgataaggaattagaaaaccataaaataatcctgtcaatctattcactaaaagctagaagttcatttgttaccaaattcctggccaagcaaaaaggtgtcaaaagggaaattaacacttaattgatccataactatgcagaaagcattatgttgggtaatttacagatgctacttaatttaattttcataatattccaataaaataagagtcatctttccattttacagacgaagcaactgaagttcagagagataaactaaatgctgtaagttctcgcatttagtagtggtgggactataattttaccatgtttctttgtgatttcaaagcccactctcaattccccaagttgtattaagccaatgtgacaggaccgaaggagcccggcagtggacacagagcaggatttgttcttctctggttttctcggtaaccagctatgtgcacatcacataaagacttcggagttcagttaatttttgtcaacatctcttgttcccttcaggtcacagcccacattcttagcatggccactctgccctatggccaccgtggcctatatgacctcatccctgcctacccaatagaagtcactcccacctaccacactccagctcccctggacccactgagctccttcagagcatcacaccatcccaccttggaggctttggttacactgctccttctgcctagcactcagtcctccttctccctctcccgctccatcccttgggtaattcttacctatccttcaaggatgagtttagccatgttttcctcaaagaagtttctgatcattcaatcacataagatcactctgctatttgcctccctagtatcatagcctcctttcccttttttaaatagcatttgttacttttaacatggtttcttcatcgtattttctatttcaaagttcatcttccttgtaagctctatgatggtgacaaacacactatctgtctcattcactgatatttccccagagtcacacacagcacctggctccataaacacatgctcccgactccgtccctcctgcttgccccttcctgtagcctggacaggagacttgggattcttccaggagagatgctctagagtggacagacttcatctatcattggcattttttaaaagacttgattagaaaccaaagtaacaagtatgattaaatgatggaaatgctagatgttaaaaaccaaggttagaactccaggttgtgtcttgtgacctcagctgcccatgagtttggcaaactgcaaaaccacgcataggaagggttattgcctcaactgttgttttggatcagtttagtcagacatgcatatggcagaattctttttttttttttttttttgagatggagtctcgctttgttgcccaggctggagtgcagtagtgtgatctcagctcactgcaacctctacctccaggtttcatgcgattctgctacctaagctcccaagcagctgagactgtaggtgcatgccaccatgtccagctaatttttgtatttttagtagagatggggtttcaccatgttggccagggtggtctcaaactcccgacctcaagtgatccatccacctgggcctaccaaagtactgggattacaggtgtaagccactgcgcccagcccagaaatttaacatcaggtgtatgtcatcaattataaagccctgagtatggagaattcatcttttgcagaaggttctcctgtggccaatttactagaaaaatacaaagaaaccacaccaggaaccaggaggtaacactatcagcaacatctttgcattaagacaatatctccatctaaacacactcatttttatttttacttaactataatttgcttgataaaaatgcaaaataatcttccgtggtaaattataaatactttcactcaatattacaattaacctatattcctgaaccccaaaccatggcacactgtctaagtgccttgtacacactattttgataaattcccacagtgactttaaggatggtactggtgttttccttgtagacagccaggaaagggaggaaaagagagatcgaatactggtcccacacagtatgggcggaatccaaacccaggtgggaagcttctgagcccgctaggaatccttcctgtttgtaagcttgctttgtatcaaatgatcaagcacagacacacttatcctaaaatggggagcacatgccctgctttctgactgaacttgaattctcagaaacattatttatgggggaaaagtcttacaagtaaagaagtcagctagcttctcagtccaaaatctacctagagaaatcttttattattgtccaattaagtttggcaaattgcaaaaccactcataggaagggttactgcctaaattgttgttttggatcaatgtaatcatacatgcatatggtcgaaatttaacatcaggtgtgtgtcatcaattataaggccctgagtatagagaattcattgcattttttattatgacaacatttaccaagttgaccatgtttaagcatttaccaagtcaatcatttagcattctatagttcaaaggtgatgggtattacatttaaaggaaagatgacatagtcaacaatgccactagcataaagcatctaatttctaggctctccacttcagctctcctctgttaaggctggaagtaactgccatgatctcaccactaggagggaaaaagagaaatctacccatctatgatagtgaagagaaagctcaaagcaagtggacctatggcgctgtgctcagacttgagcagacatcagaatcccatggagggcttgtaaagatccagattgcaggcccacccctagaagtggatctgaggtgggggggcccatgattttgcatttctagcaagttctcaggtgatgctgacactgctggtgcagggaccacacttgagaaccacccacccatgacactggtgcacaatgtttcaaactcatgccaacagcagacaggatgcatctacccacatctatacctggcacacctgcaccacacaggaacaccacatatctgcacaaggtatcacaggcatacccgtcacacacatgcacacacttttttgcatgtgtatgccagaaacacactatacatctgcaccactcataggtaatacaaactggcatcacgcacacaaacaccacatgcctacattacacactgtcgtgcacacacagctgtaccacacgtctataactcacatcatacacattcacctcgtatgcagacaggcactcacatatacactgcacataaacagtgcatacctataccacacactcctcacacctgctccacacactcacatgcatgcataccctcaacctacacatcatatgtgctgttcatctgcaccacacgtgccccacagctacacacactcacccaactgcagattccgagctacctgctgctatcaccttgctcttgagacattccctcaatccttctcctcctttccccctgccctttggcctcatcctatttttcctcatgggtggcccaaatacatttcccaaagtgtccatccaagaaggctcccgcactgtaggcatctctgtattttcttcccacccacatttgacttagctactctttgtgaaccaagttctttatgttcaatgtcagtccaaatacttttgtttcaacttaaataaatgcagcaaatagttacagatctttttctgtgcaaagccttaaactaagcatgttgaggaggaaaagtgatgaatgagacgacgctgacattcattcattcattcattcaatgtattagctaggtactggtgagccatggccagcatagggaggaggtacttgataagtttcttcccagaactctttagattccagggagtgggcagcagggtcctcttccctcttctgaggtgacttctggcccctactacaactccagatggttctctgagtatggaagaaccatccacgccagcagacaaaaattaacattcttataatattaacaataacactagcagcaaaaaaaaaaaaaaaaaaagccaccttttagtgaggatagtatggatatgtagggcatatctacatactaaaatatgtagcactatgcactacacatcttaactggtaattattcctccagatattatcaatccattttccaggtcagaaaatagaactgtgggatgaatcttgcaggtggagaatagaagtttcaatccaggtaactgacatgagccagcggctgcttcctttccatttcagcacatgcagccccttctccaaattcagacagagctcccttgattgtgcagtctgaggcagcatcaatgcaactcacagaaatggtggacatctctgtctcacctgctccgcgtctgttatcagggagagcagtgtcataaagtcaaaggcattaaaggtaaaagcaggcattcaagacaagaagatgaaaccacagtgggactttatttctttttataatttgaaacaaagccttaacttagagtaaacaggctttggcaaagaggtgacttccaccatgcaaaccatgaattccattcttctgttaggatggtctccctgttctaatggagccacatacctttgtgtggctggttacacagtgggtatccaggtagtaaggactgatttaatttctccatgattcaggcttgtccagacatttgtcctcaagctgtatttgagggcagcaaggataaagagtctcttggccagaagacgctccctcattcacctcccacttgccctgtctgctgacctccaaggaaattcagtcctgcagttaacatctgtggtcccatcagctgagttgaagtaaaaggtacttaacgcacgcagctcgttttgcaaggttagaaggaatcaataggagatgtgtttaatgtggtatcactatcagggctcatcacacttttaaaactgaaatatccacagtgctgtataatcttagtctcgctgtaaagagaatgggtttagtgtgctttaagatagatttcatgcctattacagatgcacacacaaaaaaaatgggtgagtgtcctcaaatttcactattacatatcttcttacatatctttttcttttctttcttccctttctccttttcttcctttcaagcattctcttctctctcttttcccatctctctcttctctctctctcttttcccttgcttccttccctcctttctcctctctttctttttctatctttcattcttcccttgaattttaggtgtctaattccctcccatggaaatttgccagaatttcagcaaaccaccaaaaagagctagctaggtgatttctctttgagttccccggagcacacaggtcttctgtaagattgaggcttggaaactctctcatcaaggagaggagctgattggaacccacagccttataacaaacctgacttttccataagtttttgtgaaattattccgaaagagaagcctgtctgaacagagcataattaaagatagcacattgttcttttgctgagtagattgcaaggtaaaaaatccttgttgatattcacacatcatacataaacactagtggaaaattagaaatagtaaggtcaagagtgtattatgtgtttgtggggcaatggaggttctcttcaatttcataatgacctatgtagggaaatcatggtccataacaaagggaagtgtcagaagagatgaaagaaagcaaaccttggttaaacagtccctatcagcactagcacaaggcaaagatatggatattcagctctatgagcatttgtctatggcattcttagcacgtagttctgatttaagaataactcagcagtacagtctaatgctattccctcagatgactgtttagagaagtgactgaactgcttgacttggaaacttactgataactaccactggtacaattttcagccaaaatgactaaactgggaattaacttatattggtttgctagagctgtcataacaagtaccacaaactggatgacttcaacaacagaaatatatatcatttctctcacagttctggaactcagaaggccaagatcaaggttggtaaggttggttcctcccgacggatgtgaggaagaatctgttccaggcctccctcctagcttctggaagcttcaggagctcttcagtttgttacattctccccatgtctttacatcaccttctatttgtgtgagtctgtctctgtgtccgaatttcctcttttttactagtttctcttgttttgtgagacaaactctcactctgttgcccaggctggagtgcagtggtgcgatctctgctcactgcaacatctgcctcctgggttcaagcacttatcgtgcctcagcctcctgagcagctgggattacaggtgtgtgccaccatgcccagctaattttggtatttttagtagagatggggttttgccatgttggccacgctggtcttgaactcttggcctcaaagtggtccacccacttcggtctcccaaagtgctgggattacaggcatgagccactacacctggctcaaacttgctgttttctttataaggacaccagtctcattggattaggactcaccctaatgatgtcatctaatttgatcatctacaaggaccctatttccaaataaggtcacattcataggtgctgggggttagggcttcaaatatatatatatatatatatatatatatattttttttttttttttcgagatggagtttcactcccgttgagctaattttggtatttttagtagagacagggtttctccatgttggtcaggctggtctcgaactctggacctcagatgatcctcctgccttggcctcccaaagtgctgggattacaggcgtgagccatcgcgcctggccaggacttcagatctttagggggacacaatccaatgcataacaacaggcattcgttttcacatccacatgttcatcacttaattattatccttactgagttgtaaatgcatactgtatgtcactttatatattcacaccaaattctctttcatatgccctaaatgcctctgaatagaggggcttacatgccaaaaaggaaatgaaatttcacttattttccctatttgactatccagagaatgagcctttcccatggcacaggacaaagatgcaacccatgccataaagggttgaggtcccagccaatccaaacagaagtgtccattgtggaatgagggtacccattgtcatagccactgtccttcctccaggaattcaccaaaagtgaggatgaggcctaactaagctagacgtggttatatgaaagcagtactctgtctttcaggtaagcgataaaaactagttcatgacatgggtaagctacacatcaaattgagtcttttggcaatattacataaaatctgacacgacttatgaggttgtccatcctgtctcattaatatctaaattactaaatttcttttgctgattttcctccacatgtttataacattaaatatgcaaaaaagtacttttttactaatgcccttataccaagttcttcataatttatttttttcttttttgtgagacagtgtctcactctgtcatacagactctgtgatccatccatccactgcagtgctgcgatctcagctcactgcaacctccacctctggggttcaagcgattctcccacctcagcctccagagtagctgagactacaggcacttgccatcatgcccgtccaacttgatggggtttcatcatgttggccaggctggtcttgaactcctgacctcaagtgatcctcccacctcagcttcccaaagtgctgggattacaggtgtgagccactgggcctggccagtctccatggtttaaatatcgtttcagtatcagtgtcaaaaatttggtgaacatataagtatcaaataagtctacaaatcctgtgattatggccccaggaaggaagtaacaggtgatttcccttcagagaatcagcattttgccactccaggccaccacttgaggagtagtatacctaaaatatcatagctaaaggttagggcttccttaacttgattaacccaatttagggccctacttgaagccacagcagattgtactcaatcttactattttattttaaaatgaagagtgtatgtacaaggttcccagtttaataatttaataagcccactaaaaagtgtctcagatctgagaaacaagcactttttacatgaaaaaattcaaaactaaagaacaatcacttttaaagcacaaaggaaggacaactgaaaaaaggaactgtgtgtttgtaaaagtaagaatatcttccatcacttggatttatagtatatttcatttttcctgaataaaccacatagacattaatgtaccatttaagtttatttgcaaatcaagaacttaatggccccttaaaactgaaggtaattctgatatctataatattcattcttttttacctttggtggacactgcaatgaagcaaatgcacgtgattattctcagtctcctgatggagatggataaaaagtactagatccctatgaatgttttttcacatgattctctatatgtagtatggccactgtcaaaactttgggaaaattctgaattttgttatgctcatataatctacataaagacaaagaccagttatgtgcctaaccaagagcacctcatggcctgataccagcagagtgaagaattgcagctagaccattcatcctcctgactccagcctcaccccacttccactcaccctctgtgtcctttagttctgagccactgaaccctataattcagcaccttcctctttcaggaggtcatctcggctttcctggtctgcttgtgaacattctcacatttacccatttatttctatcctaggaacctcgttccccatgctctctatcccagatggctcacagtcttaataatgcaccaaaggtgagggcggaaaagctgagcaatggaacatattgacctaggtgccccgaggaaccagacactcatgtgactggatgaaaacgaaggctctggagcattggctttctcatctgtataatggataaactatttccaaaaccaagttgtgattgtgagagtccaaggatctagtgaacctggtcagagtaagtgcttagcaaatgttaactattttattattagtaataataactagttattattgttaatattttaccatctagataggtatcaatactttaccatctagattgttggtcaatattttaccatctagatagatgtgatctattgtttatcatcatatcatgaatatatttatattttaacagcaaatgagacactggggctcactgactttaccattctcatctaacagatggaagggaaaggtgatctctacagcagctaccagcagacccagggctaggactcagctgctccaattccctaattcctaacttgtccttggcactaggaagtttctctcttgagtcctgagaatcagagaattgatgttcaccttatcaaataagatcttttaagattataaactcagcaagagaggagactgtttcatagttagagtcccaatttcctcttcattctcttctgcatttgggggagtggaatgctttgagatatccctctaaagcttcaagatactctcctgggaatgcaagagcttgcccagggtcatttgatgtcaatgacacaccaataaaaatgatgctaaaaatagcattagttaacattttccagaatccatatcttccttattagacattaaaaatctctaaaaatgcaaaactattttttcttctggttgagtagaccctctcaactctattctttcactattatgagaaaagcacactgcttccctacactctcacacacaacttctgacaccgtatgtaagaatagtgtcacactatccacccggagatagtgctagatcccagagcttaagagctctgcctcacagaactgcccccacttcatacgccaatcacaagccccaggctgtggcctgtgcttttgacccaacagctataaactagtagttcccatgactcccatccttgggttttataatttggtaagacagctcatagaatgcagggaaatacttcactatgtttaccagtttattataaaggatagtacaaaggctgtacatgaacagccagatgaagaggtaccagtagcaagatactgggttgagaggggagagggtggagcacacagttttcatgacataaagctttttccatgaaaaaggtaataatatatgtgtattgatttcctagtactactgtaacaaattaccacaaacctagtggcttaaaacaacacaaatgtctcatataattcttaaggtcagaagtctaaacaggtgtattaggccattcttgcgttgttataaagaaatacctgaggctgggtaatttataaagaaaagagattgtattggctcagggttctacaggccgtgcaagcatggcactggtatatgcatctgcctggcttctggagagggcttcagggagcttttactcacggcagaaggcaaagcaggagcaggcaagacacgtggcaaaaacaggagtaagagagagcacagaggtgccatgcacttttaaacaagcagacctcatgtgaactcagagaaaatctcactcatcaccgaggggatggcgctaaaccattcatgaggaatctgcccccacgacccaatcacctcccaccaggccccatcaccagcatgggaatcacgttccaacatgagatttggaggtgacagacactcaaacgatatcattcagcgcgatggcccctaaaatatcatgtccttctcaccttgcaaaatacaatcatctctcccaacagttccccaaagacttaacccattctagccccaattcaaaagtcctaaagtccaaagtctcatctggagatgagtttcttccacccatgagcctgtgaaatcaaagacaagtttcttactttcaagatacaatgggggtacaggcattaggtaaacattcttgttccaaaaaaaagaaatcagccaaaagaaaggggctataggccagcagggcaatcattaaatcttaaagctccaaaataatcttctttgaccccatgtcccacattcagggcacactggtgcaagggacgggctcccaaggtcttgggcagctccacccctgtggctttggagggtgcagcccctgtggctgctctcacaggttgtcgagttcctgtagcctttccagacccccacatttccccttggcattgccctagtagaggttctctgtgatggctccacccctgcatcaggcttctccctgagcacccaggctttcacatatatcctctgaaatctaggtacaagttgtcaagcatcctttactcttgcgttctgagcacctacaggcttaacaccatgtggaagccactaaagcttatggcttgtgccctccagagccatggcccaagctacacctgggacgctttgagccaaggctgcagccagagaagtgaagatgcagggatcaatttcctgggtggcttaggccattcgcgtctcaggcttggcccacaaaaccattctttcctcctaggcctctggacctgtagtgggaggggctgccttgtagatccctaaaaagccttcagggcctttttccaaacatcttggccatcagcacttggctcctttttagtcatgcaaatctctctagtaagttgttgttctgtggcccacttggatgcttcctctaaacctaggcttttcttttctaccacatggccaggttgcaaatttttcaaatttttatgttctgcttcccctttaaatataagttccaatcttaagtcatttctttgcccctatatctgccagtccacctcttaaaggctttatggctaagaaattttttctgccagataccctaaatcatcactctcaagttcaaagttccacaaatccttaggacatgaacacaatgcaggcaagttctttgctaaagcagaacaagggtgacctttgctttagttcccagtaagttcctcatcttcatctaagatcatatcagcctggccttcactgctcatatctctatcagcattttggtcacaacaatatgaccagtctttaagaagtttcaaattttcctcatcgtcctgtcttcttctgagccctccacactcttccaacctctgcctgttacccagttccaaagttgcttcctcatctacagatatctttatagcaatgccccactccttggttccaattttctgtattaggctgttcttgtgttgttataaagaaatatctgagactgggtaatttataaagaaaagaagtttaattgactcaaagttctgcaggctgtgcaagcatggcaccaacatctgcatttgtctggcttctaatgaggcctcagggagctttcactcatggtggaaggtgaagtgggagccagtacatcacgggagagtgggaacaaaagagtgaggtgggaagtgccacacactttggtgataagtgagttcttgctcagagtttcacggaaactcactgaatttgcatgaaactctgagcaagaactcccttatcaccaaggagatggtaccaaacgtttcatgaagaatctgcccccagaaccaattaccttccaccaggtcacacctctaacattgggaatcacattttaaccgagatttggagggaacaaatatccaaaccatatcaatgggtctctaggttaaaagcaaggtgtccagagggccatgcgcctcctgaagtcttccatcttctatagactgctcactttccttggcttcaggctccttctactgtcttcaaagccagcaatggtgcctggagaccttcttgcactacagctctctgacctctcctgcctccctcttccacttttatggacccctgtgattacattggacctagcagaataatttcagatattctccttactttaaggtctgttgattaacaaccttaattccatctgtaaccttcattcttctctgccatgtgaggtaatatgggttctggggattagaatgtggacatctttggaggagccattattctgttttccataagatgtaaagtacctgtttagttctagtagttttctgtcatagagaatttattttttcaactgaaaacacagacagcctaattaaaacttaatttaatgctaatacagcaaatgggtttaccactttgtgttgaattgcttcaccaattctgggtttcttgagaaaatcttctctaacacccccatttcacctggggctctttgactcacatggcatttaacaaccaagacaaaattggaatctggtgtcctgtgaagtggtttctccttatcacattccaccatcatgaagccccttgaagttactgctccaaaaaatagtgactctcccctgattcaacagagtggactgacctacaaggcagtctgcactggctgatcaaaacacccatgtacattccagacaaaattcgtggaaagcataattttgttttaatgctaggacagaaaaaaatttcatcagcattcagagtatttgtttaaaattctgacatgtatacacaagcatttcatcctttgtataatcaaaggccttcatacaataaaactactgggttggtgcaaaagtaatcacagttttgcatcaacctgatacatctatcaagttttgaagggaaaagattttattcaagaatcttgtcagccgagcacagtggttcatgcctataatcccaacccttttggaggctgaggcaggtggattgcttgagcccaggggttcaagaccagcctgggcaacatggcaaaaccccgccagtacaaaaaaacacaaaaagtagacaggcctagtggcatacacatgtagtcccagttacttgggagtctgaggcaggagaatgcttaccccaggaagttgagggtgcagtgagccatgatcctgccactgtactccagcctaggtgacagagcaagacttgtctcaaaaacaaaacaaaaaatgcaaattctgtggcccaaaaaattgttgtctacatgtgaagggacctgaaagaggttttgagaaagcacataggcatccctgggcatatttgttcaggatctacttcaacttactaagaaaaaaatcctacaacataatatgataaaatttctataagcccactctaaaatcacaggtgacaccaatgaaaactgggaagtgggcctagatataatatggaaactaaagactactaatcttctcactttacatagatgcgaatcagtatttagtgcttttatttttatgtaggtagtttaatcaacattaatgtgtttaaaatattaatattattaaaagcattttgataacaaagtatattactagtagaatttaaaataaaattgctacagaaaagagcaaagaaaacagagtttatattttttaaaaacttactagggaaatagcaggaaaaaaattttttttaatgaaataagataaagaaaggaagcacaattacatcagtaataataacataaacatctaccctaaactgcaaagtaaaagacagccacatggtttgatttggttagttcaagtggtgagttaatcaaattcaacctagtattatttaaaagccctaacacttaaaataaattggcacataagtattattaagtgattaggcaaacatgtaacagctaaaggcaggaagaaataaaataaatataagaagagaaaatagaaattttcatattcttatcaggcaatggagaattaaaagaaaaagccatctcctgaaatgaagagagttatagtattttgataataaaatccaaaaggaaaacatgaaagtcataaatctttatgctccaaataatattgttcaaaatatagtaatcacaaatcattagaggaataaagataagttaacagtagtgggaccttcctccatctttcacagttgaagtatacaaatatatatacacctgggtggggcgtagagaaagaagttccaaataacaataagatttattaggtttacagaaagtttggtgtcttatgagagaaaaggatgatatatttcctatcaagcttacaaagaatattggcaaatactaattatatagtacactatatactcttataagcccaaaaaatagaaaaaaagacagtccaaaattatcacatcacaaattattctctacaaaaaaattgcaccacagtggctcaggcctgtaatcccagcactttgggaggctgaggtgggtggaccacctgaagtcaggagttcaagaccagcctgaccaacatggagaaactccatctctactaaaaatacaaaattagccgggcatggtagcacatgcctgtaatcccagctactcaggaggctgaggcaggagaattgctttaacccaggaggtggaggttacagtgagctgagatcatgccatggcactccagcctggggaacaacagcaaaactccgtctaaaaaaaaaacaaaaaaaaacaaaaaataattgcactaaaaatcaagcacaccattaaggattattttgacactaatgaaagtgaaaacataatttataaaaacgtctggaatgctgatacagttatataccaaagcaaatttatagcttgtaagccttttatcaggacgtcagaaagaatgaaaattactaaaataagtgttcaatttttaaaaatggaaaaacaagaacaaatacaatttaaggaaaacaaaaaggggaaaataacagcagaaattaatgaattagaaaataaattagataaaataaacaaatctaagagtggattctttgtagaaaaaaaatttctgatcaaacatttagcaggcctaatcaaatagaaaagagaaaaaacatacatacataaaactgggaataacaatgaatatgaccacagacataagtaaaaattgtgtaatatcgtattctgacaaattaaaattttaaattaagcagatgattggtaaagaaaacataaaagatgccaaaaagcttaatgaataaataactagggaagaaaatttcacaattttctaaaatttctcgtagagaaagatggaagaattttccatttttttatgccaatctctacatggatatttgaaaaagtgaaaaactccagaaatataaatctatggaccaatcttcctcataattatgaatgaaaaaattctaaatcaaatattgacaatttaatttggaaatgagtctaaaaatattatatcatgttcaagaataatttcctctaagaatgaaaaaattatttactatggaaatttcaaaagaattcactgcattaggtcaaaagagaagatgctcaagggtattaatttattagagaccaaaatgtatttgacatgtatatagcatctgatactgattttctcagtcttttaataaagatagacatctatatgtcttaagatgataaagaccactattgttcactattagccagtggtctttaatgctaaaacaccagagatatccatattaatatctgaaaaatacatgataccttctataatcactatttttaaaaattgttctaaatgttctggcattgcaaaaatacgctttagtggcgagtcacagtccataaatatggtggaaaaagaggcaagttattagaaaaagaaaattacaaaacttaactgagggatgaaaaagaaccgcatgaaagaagtgacaaattatattttagaaaagaaatataaatattaaaattcttcccccaaataattaataggcataattaattttgtttaaatccagtaagatttttggaaacatggtaattaaacgctaaagtacatctgggagaatggaatacttaataattgaccattcagttagaaaagcaagagacagagcagttgatttcagaaaatatatgaaatttatgaatatgtagtataattatatgtagaagcatatatattataaatattagttaaaatgacaaaaatgaaaacaaatttgaaggtgcaatacaatactctaaacctagaatactaggtatagaaattatggaataactatatagagatttcaaggcagatgttaaacatcatgcagaaaaatattataccagtaagtccatgttcacatatttaaaatgatcccaatcctacaaatatatatgcacataaactatatatgtaatacataaaatatatttgtgctgtccccaaaacattttttacttataaaaaaaatgctgcagtgtgataccagccataacaatccacatcaacgatgtggcattgctatgttgattctctctaaatgacatgtttttggatgactattattttctttttgtgcttttctgtatttttcatattttctgaaaggaatgtgttataatatcagaaaagatattttgtatgaataacaccgtactagtattgtgcataatgttttgcataattctaattttttaatcaaagaaatctttgaaaatcttataaaattgttagcactttctccagaaaaaagaaacgcattatatacaagtaagcatcaaattttatataactttacagattttatagacccactgaagcccattcaagcgttccaggtgagaaacagactgtggaaaagttcaaagaaattccttaggcattatctcaatggagtctcatcaaaactttgtagacaggaatagctactacttttgccaatttaagaatgaataaacgatgcctcagagaggtaaagaacacacagttgacagggacagaattcacaccagtggccacgtcctgttgccttaccactgtgagtttcatgtcgtagcacagggtggtttattatacacggaacaggatattgtcaaataacaaaaccagaccttgaatcctgatttgcccgtgaaattttgaaaaacctcctgactttaccatgccttggtttcatcatcaataaagtagcgataataacacttgccctgcatatcccccagagttgttatggagataaaatgtagggggaagcacttgcaaacataatttatctttattattattaaaacataaacgtgtctattacgcatctattacaactcaggccagcactggggtaagtgctgatgggacctaggtggaggaagaaaaagacaaagcaccttactaaaaggcaattaaaatgcaccattctagttcaaaaagtctgtttccatgagtaattagcaatctattatgcatctgacaatggtttgttggctattacatcagttccatgtgcccatcctgtaaagtgaatcaacacagcagggagttcccagctttaaaaaatgtttgctttcacaggtatctgtctaatttatctctgtgatttaattttaatgattaaaattttaagttaattttgaagtctgctctttttccaccgcattcaccacagacttgctgaagactccaggacaattaaggcacataaaagcataacaaagctccctctccctatttgaccctatcaggcttcatattcttactgtcagaggtaattcacatgccttgataccccggatattttgtttgcataagtaggctaggtctttcataaatgtgagtggagttgcagtgtgtgaataagatgctgagctagtggtctctgaggtgagaacacttcatgcaactcagttttcttgtcagtaatctgggtatcatgaagccagttttaatgggaaaagtctctgtaaattacaatggcccatgaaagtggaataaaacatgattttttgcatttagaacatccctgagccagttccttccaatatcttcttcatcacaaatagtctatgacatcacctaatgtacttaatagtctgcctctaaaactgaactgagactcacgaccgatgttcttgttttgggtttttgctgcggattgcgctcacccatttagataccccttgttcactattcaccaggggatgggccatctggatccattatctgttttatttcttatgtaccccacagaagagtagttaaagcgaaaaactttatgtgctgatccattcatccttagtcacaacccttctactgttgctccggagtgacggttatagagcccgtaagtgtgagatcactccaggctgctcttctaacctctaaatggaatcagtcctcagggatggatggaatttcactgcatttgcccatttcatttgtataatgaaatcattgtttggcctttcattctgtactcttgccctttttggtcttaaggtggaccattcagtagccccttcctatttctctacgaaaactaagaatcataaatggactctcatcaaatctcaacaatttcatgtatttgtaaaaatatcacatcaaatacattccaccttcacagcagtatctatttgttatatacttgcatgtatttatatacaaatagaagtgaatacgtatataaatctataatgtgcggacgtggtaaaactcaaaccgtcaccagaaaaatcaatcgcttatcatcactgattgggtcagtcgtgtgacgatatgatccatgtgtgatcgggttcaactccaaagagcagcatgcaatgaaacattagccttccctggaatcacctggtgtacttgttaaaatagagacaatcatacctcgccccagaattacaggtggtttatggaacagagataaagtttttaaaaaatgtatttgttgatttatagccaaaatctccccaatgttacatggagggcaacaaaagggagagttgttgagtaaattacacaatattcatttaatgggaaccccacagtgattagcaagaagcttattaaacagaaaaatgcatgtggtattatgataaataaaaagccaacataataattgatggatcagagaaaaaggtcagcagtaaatcaacatacttgggaagctttagttttgagcaaagatgatcattcaaatcagtagggaaataatgtattatctaagaaatagtggtgaggcatctaagtagctacctaaaaaattgtatccccctttacacttacaccagcacaaattccagaatgaatgaaagtaaagccataaaagcaataaaggagagcatagaaaatattacaatctcaaaataagagagttttccaacactaatataaaacccaaaagacaataaaaaatactgatcgatccaacagtgtcaaggcctgtttttatatgctctttctccccaaataaacaccataaacaaaaggacaaagaacatactggagaaaatatttacaactcttaatgtacagggctaattaatacatgagtcattaaaggtcaatatttttaaaattccattaaaaatgggtaaatgacaaaaaaaatatagaaaataaaatatgatagcttttcatcatatacaaagtttctcaaccttacttattctcagaaatagacaacaaaacttcaggaagatactatatttcacttttcaggttaagaaagatcaaaagcttgatgacacactatgttgtggagaaatgagcactgccattcattgctggtgggcgtgtaaactggtaaatctctagtcaattaaaatataaaacgcacacaccatttgacccagcacttccatttcccatgaatttctcatgcagttgagaatttaaattttaaaggaaaatgataactctttcttggtcatagtcctaaggtatcaacaagtcacttgttgttataaacaagtcacttgtttgatgttataaagacatcaaaattggccgggcacagtggctcatgcctgtaatcccagcactttgggtggctgaggcaggcagatcatgaggtcaagagatggagaccatcctggccaacatggtgaaagcccgtctctactaaacatacaaaattagctgggcgtggtggtgcacgcctgtagtcccagctactcgggatgctgaggcaggaggaccacttgaaccaggaaggcagaggttgcagtgagccgagatcgtgccattgcactccagcctggtgacggaacaagactccgtctcacaaaaaaaaaaaaaaaaaaaaaaagacatcaaaattgatccgtgacaatccactttcgtaacatacttctgcaggctagccaaacaatcccagccatacttctgaaatccagctattagcaacaggcacactccaaatgccaagctttcacggctaaaggtcaactaatttctaaacacacttctcgcagtgttttaattcctgaacttaatacttcccaaaccctatatatgatcaacatttgctttgttttgacagaaccgtgtcctacaagcactgttgtctcttgtttagcaaacaataaagtcaggtttttgctttagatattgagtggtagccttttccttccatccaagaactagaacataggagagacagcatatgcataaagatgttctactctttttcaaagcattgtttaacatagcaacaggttgcaaacaatgtaaataatctcgaaggaccagtaaattagaaaaacagaaacaccacatgtgtcctggaaagggaactagctggcatggggcaaaggagggaaggagagaccaatacatttcatacacacaattttggagttcataacattttgccccataggcagatattacatattaaaaagtaagttatttaaagtcagaattttaaattgtatgtgtaaaaggaaaaaatacatatgaagttggtaacaaaccagtaactgttggtatgctaaattattggtggaatagttttttcaatgtctgtttccctaaacatttcataatgttgtgacataacttataattttaaatggaaatgatttataaatttcatgcacaatatcaaaccaaaatgcagcaaatgagattattccattgcaagttggcatataaccacaatattgaaggggcataaagctaatttctcttattaggagaaataaccaaggagaaaagaggaattagagaagtccaattacattgcatgagagaaactgacagaacaaaatcttcctgtaatattaaaaggcttcaaacaaagcccgaaacctctgtgagacttgaagctaacacttccattcccaacagcttggagagcaacactcctgttgcactggaactcaggtgcaactacagacacatgcattacttgtctatttttgcaagtaaatagttgcaaaatacacaagtaatgcatacgtattgcaaactttgcaattacttgtctattttttaaagtacacctagtaaagagtagatgcatattttgctttattttaaattagttctttctccctgatatacaagtccaggaaagatcccagcagcctctacttccagaagacagctacatgtacagcacaataccaatcagaaatgacatctcccaatatcatatttgctgagtcactcaagtactcaaaaagaaagaaaaaatagaccttagttttcttaccactttgccgtgtgctcttggaattcagaagccaggttaagctttcttctttcacctggagacctctaaaagggaagaaatagtaaaacaactgaaatcatgttgcttaaaagctatcctgagctgttgaggggggaataaaatagtacattaaaatgatccaaaatatcaaacagaactattttcatccatcattggatagtgacacattactcagactgtgccgacttgcagggtgaggttaagttgcagggtttcagccacccatcaatcctaaggtaactcacaaggcatatttgtattattccatcacttaagacaactttaatccagtcccccattccattttcatttctagtcttgaaatacttaatacagggtaaattgattatagaaaaaagtaacactcttggcatagaatttaatttttgcagtttattcattttaattggtgtctacactcaaaacctttgacaaacaagaaatttgaaagatctgataattaaacagttaatccaaacttcctcctgtaggaaaaattgtaatttttaggactaaaaccaaaaggcaaactttgaatatatttgtatttcttttcatgtttgagaaatcacttaaataatcactcgtatcagtcttatacataaaatttatagttttaaaagtttctttcaaaggctatcattaggtgatctggcactgtctaataaaattaaaaatacataaggccaggcaccatggctcatgcctgtaatcccagccctttggaaggccaaggtgggggcattgcttgagcctaggagttcaagacaagcctaggcaacatagagagagacctagactctacaaaaaaatttaaaaattaaccaggcatgggtgtgcaagcctgtagttccaactacttgtgaggctgaggcaggaagattcagttcacaaagttgaggctgaagtgagtggtgattatgccactgcactccagcctgagtgacagagcaaaaccctgtcccgaaaaataaaataaaatgaaattcttatgctacaattccatttctggggatctgtaaaggcacatgtaccatgatactcattacagcattgctatttggaggtcaagaactagacatcatgttaatgcccatagatgaaagaatggtgggataaacccatggagcaatgttatatccactggacagactatgaagcattcatgaaaagtaattaaatagcattaattatatgttaaagaaccttgtcaacgattttgattcagacaagcagcaggtagaaaagcagtaggtagaaagagaacaaaatggttactatatatatacatacatacatatatatatacacacacacacacacacacacacacacatataaacaaattgtaaaactaagccttcatatcagttattcccaatcaagagtgatattacctgctagggacatttcgtgatgtctggagacatcaaagctgtggggagcatgctcttagcatctggtgggtggaggccagggatgctgctgaacatgcctcagtgcacaggacagccaccacaaagacttatctggcccatgtgtcaatagcactgaggctgagacattcctgtatgtggatgtgatatgattttataattaaattacataagtatagaaaatgtgtggaagctcacacaccaggttgtccacgtagctcatctagcaagagatggaggcggggatgaaggctgagatgctagtggagaggaagtagtagtagacggaggtgcccagggtagggtcagctttataatacaatcttatctcttatatcttgttatgcttcggctctgtgtccccacccaactctcatcttgtagctctcataattctcacgcactgtgggagggacccagtgggagatgattgaatcatgggggtgggtctttcccatgctgttcttgtgatagtgaatgcgtttcatgaaatctgatggttttaaaaagggaagtttccctgcacaagccctctctttgcctgccgtcatccacgtaagatgcgacttgctcctccttgcctcccgccatcattgtgaggcctccccataaatgaaactgtaagtccaattaaacctctttcttttgtaaattgcccagtctcgggtatgtctttatcagcagtgtgaaaacagactaatacatacctgtatcaaattaccttgaaattattactgtcatgtttctttttgttccttagatgcagcaaagtaaaggcataactttaaaatttcactaaaccacactcttcccagataaaagaaaaataaacccaacttggaaggaaaccccaacttaaaggccatcaaagggagagaaatgataacagccagcctggcctttggccaatctttgtacaatattgcttcgattctcctaaataatcttgttgatttcaattaatttgaactggcctcaccctcttccactgttcatataagtagtgtggtatttttattacacaatagggaatttaattttaaatagagcagagcaccaaaaatatgaaaagtcactcattaactttgcatagatgtgagtatggctggtgtggttgttccacttttcctgctagcaaatccacaagatacacttcaaaatgagtattctcccttatgtcagacgtgaaccacacctagtcaatgccatttctgaattaagaagtagtactttttgtcatctttcctaaactgttagtcttcaggtgttttgtgtagatcttagcaaagtcacagagcttcattgtattctgagtaaacccctctttgatgtaagcccttgtgaggcttgtatatggctatatggcattactgtcagacatcagcaccaccaagaaaaagtacctattctcactaaatgccacatgtcaggttcctgcatacacataaaatgccaggaatgcagagggtgatatgggaggccaaaccgatcctcactgttcatcagaggaaaagaacattttttttgtactcctatttctaactcttcccaggcccttgccccttgattccattcaccctgctctcactggggtgataaattctccttctctcattttttgctcccattggttcttttctcactccttccccataattttattttactgtggaacatttccttactggcctgtaatgttttgtgattctcagcataaagtatttttccacctgaagtctccttacccaaatatctatcctcaagctattgtctgattgcacttccaatctcatgaagatactgtcactagtccggcctacatatccatactcatttgtgtgcactaagtgcttgttttctgattacccctctgatgagatgacaccacaaccctttgatgcctactctgttctgattctcaaggtctattttaactttctttgttatgtcacaaaacacagattataagactatcagagtacagctgggagcactggcccacagtagccaataggtttcaattcccctgctaatgccattcattggaaagtgtgtttttgcagtgtccagaggaatgccccgtggcggaggccaccatgatgcatcggcagtgttggcatcggtagaagtgggtagtggcagtggacatggccagcatctgtttattgtcccaaaaccagtcataagggaccttttgatgacagggaaaatctagggtatatgtgcctgttctatgtacctgaagtgcatttaagagtgtggatatatacatagacatgcacacaaactacctgtgtgtgtctccaatgtggaaaagaccaaaggtgtttgtaagctgtagacaagataccagcagagatttcttcttgtttcttccatattttccagtaaagtccaaattccttcctgacataaacttcctccctagccttctgttgggcaactctttgaagagccacccagaacatgcttcttgccagctctcatgactggttccttcactgtacgcaagtgtctgctcaaaggtcactgtgatggttaatattagtgtcaacttgattggatttgaaggatgcctagatggctagtattgtttttggatgtgtctgtgtgagtgttgccagaggagaccgacatttgagtaggtggaatgggagaggaagacccaccctcaatgtgggttggcaccacccaattggctgccaacatggctagaacaaagcagacagaagggatttgccttgtctcagatgagattttggactttagacttttgagttaatgctggaatgagttaagactttgagggactgttaggaaggcatgattgtattttgtaatgagagggacatgagatttgaaggggccagggccagaatgatacagtttgaatctgtgtccccactaaatctcacgtggaattgtaatcctcaatgttggaggaagggcctggtggaaggtggttggaatatggaggcggagtttccatgaatggtttatcaccatccccttggtgctattcttgtgatagtgagtgaatgagttatcacaagacctggttgttatacaagtgtgtggcacctccctactgtctctcttcctcctgttccaaccatgtaagacacctgcttccccattaccttctgccatgattgtaagtatcctgaggccccccccacagaagcagaagccactttgcttcctgtacagtctgcagaaccatgagtcaattaaacctcttgatatggtttggctgtgtccccacccaaatctcatcttgaattatatctcccataattcccacatgttgtgggagggacccagtgagagatcattgaatcatggcggtggttcccctatactgttctcattgcagtgaataagtctcatgagatcggattgtttgataaggggaaactcctttcgcttggctctcactcttctcttgtctgccaccatatgagatgtgcctttcaccttccatcatgattgtgaggcctctccagccacggggaactgtcagtccattaaacctctttttttgtaaattgcccagtcttgggtatgtctttatcagtggcatgaaaacagactgatacacttcttttcttacaaattacccagtcgcagttatttccttatagcagtgtgagaatggactaatacagtcacctcctcagagaagccatgtttgactattgtatgaacagtgcctggccctgcctcctggctgttcagccccggcctcactctattccataagccagcatcattttcttcacagcatgtgttcgcttctgatgtaacactatcgatgtttgctaggttatgtgagtcttaaccctgtattcatcccctgcccacactcactgtattgtgatcaccaccatgggaagggctgggctgtcctctggaccaggcatctaccacagggcaaggcatgaggtggacactggacagaggttcatgcaatttcttagttgatctgttttctgtacagatgaggaagaaaggctcagagaggtgatacgacccagccaaggtcactcagcaaatactaatgactgaacatttcatttgagcccagaatcctttgccctcaagcattggctcagatttaatttactttgttttgttttgtctttcagaaaaaactataaataactgatgcagactgttttttccccaagggaagcccagaaaagtgactgtatattctatgaagaacataagtatgtttcagtcatgagccagacattttcaagtaattctcaggaattctcaaggaattctgagtcctgaccttcctcttcccatggtgaactcagagccacaaagtctgctgcacacggagcttctatagatgcaaatctgagaaccctgttggctcaaagatatcactgccgcttataataagttgctttgcctcagcttccaaaacctcactgaaaaagcaggctccaattctaatacctcttatcctgagtccctgagacaagtcacttccttcccccaaggcccccatcatctccttctccttcttcctcctcctcctcctcctcctcctctttttcttcttcctattctctcatttggctcttcatttgtgttttgattgttccttgtgcctagttcttttataacatccatggcacttctcactgttaggtatttggttatatacacagcgagtatcctagattttggaaccaagcatgtgccaagtgccttatatgttacaaagttaatttatttaatcatcccaataaatttatgcagccaatatttgtatcccagttataaagattaaggcaactgggtctcagaaagatgaattcacttgccccctaatagagctcagagacagcctgtcccaaagtccagttcatctttttacatcattgtaagtcactataatccctttgggacttacatgaaatgcagaatggggagagagtgtagagagaatgggagataggcaggcagtatagaggaggtaagagcttgggctttggagtagacttcgtgtttgaatctttatgaactatggacaagtgatgtaaccattccaagcttcacaattctcttaaaagctttgcaaatctgtctttcaaaaagtaaagagagaataatattttcctgataaaaccgatatatggccggacatggtggctcacgcctgtaatcccagcactctgggaggccgaggcaggtggatcacgaggtcaggagatcgagactatcctggctaacacagtgaaaccccgtctctactaaaaaatacaaaaaattagccagacgtagtggcggacacctgtagtcccagctattcgggaggctgaggcgggagaatggcctgaacccgggaggcagagcttgcagtgagccaagatcacgccaccacactccagcctgggcaacagagcgagactccatcaaaaaaaaaaaaaaaaaaaaaaaaaaaagctgatataagattaaataatatataaaatgtatatttgcccccgagtctaaaggataagtgatgtgtaaatatattatctaggaaacaccagaggggcaccagtgtgtgcatcggcagggctgagtatctggaggccctggtgttggtcccgtgtgcagaaccttaagatataacaagatagaagtcctgagctgttctgaccctggagatgtgggcttaactacaagtgcatattcccatgtctttcccagccactgacaagctggaatgcctaagatcgtctggctgccaggaacagctggaagaacaccagcatgtgataggggacagagatccagagcacttcaggagaactcggggagcaggcaccatcttccactgaagggcaggttgttattaatcgtggaaaataattgttctcaaaatcctggttctcttaaaatgcaactaccatatttcatttttctagtgagtagagtcaccaaatttagcaaataaaaatgcggtacagctagttacatttgaactttagataagcagtgagtgagtttttattgtatttctcatggagtatttggtaagcctagctctgagcaatgttgatttctaggtatcctttctctagtttaaccatcacagatgtgactgtgttggaaaacattggttcccagatgtcataggaatggttgataagggatggctcttagaactctgaatcaaggaaaggcccaggaacccacaagtattctacatcttaaccactatcccaaaacagcattgctattgctattgctattcttaactctctctgtagtggcaatgaaaatcccacattctgcacatgtgaagtgtctctccactgtacattgtttccttttaattttccaaattcatattcttctcattaaaataccagacactcacattaagacagagtctccgtctgtggttcaggcaggagtgtagtggtacaatcatagctctctgcagccttgactttctgggctcaagcagtcctcccaactcagcctcttccctggtagctggactataaataagcatgtgccacaatgctcagctactttttaaattttttgtacagaccggctctcgctatgttgcccaggctggcctcaaactcctgaactcaagcaatccacctacctcagcctcccaaaatgttggaattacactgcgcccagctcttttttctaaataaataaacaacacttcgatttctgtttttaatcaccccatccccatacgagatcactattaatcgtggttgaaatttcccacaaagtcagtgttgtcttgctttgcactatcaaaagttacccttatggcctacaaggaattatcgggttggtgcaaaagtcactgtgatttaagccattactttcaatggcaaaaacagcagtgacttttgcaccaacctaatacaaatatttacgattttgatgtgacttctttaaacgtctgaataccccaaatgtgtatttaaaaaactactttgaaacattttaggtaagtatgtatgagtcaaaacatctgtgagggggaaaatgacaatttatctgtatttcaaagatcctatctccaactttaccgaggtacaactcgcgaagggcagtgagagactgtcgcagttttgagtctggtttcatgtctctattctacccatatgtggaggtcatctgataagcatgggtcaccctcatggcaggagcagttccttatccatgctcatggccctaacagtgatctttcacaccattccttgggcagaaacacatttaattattgttatgcaagaaatgtatccttgcaaaccactgaacttgtcacaaggtggtttgtaaacatttctcatgcaaataaccctctggtgactgacagcagtcccttccagggcctctttcctgcagtgctgattcagtggggcgggggtggctggctctcaaggagggcccaggatcccgcattgtttttttgtttgtttgttttgtttgtttgtttgtattttttattattatcctttaagttctagggtacatgtgcacgacgtgcaggttagttacgtatgtatacatgtgccatgttggtgtgctgcacccattaactcgtcatttaacattaggtatatctcctaatgctatccctcccccctccccccaccccacaacaggccccggtgtgtgatgttccccttcctgtgtccatgtgttctcgttgggtctgcgttttaaccactaccccaatctgacccaagtgatgctggttctctgaacacacttcgaagaataatgctgtcccctctataaactgctcacagatctacgaagatgccagcaaagtgacagagaaggcttataggtttaagatctcaaaagaacttcaatccagggttaaagagaaaagcaaaactaaaagttaaacatcagaaggatacctcagtcaaatgagctttccagggttcctcaatcttccccaattcctgagcttgatattgacctgggaaaggtcaagctttaaagttaaatgcagaaccttttaacagctgcctatctggggccgaggagggtacacatgtggagcaggacctggaaggccatgccattcctgtggcccctgcactcctggtcctgcagcacctagtaacccagcctggatcgggcatgacatgtcatgccacaaaattcccctctgcatttgaacgtagtctttctttctcagataccctccatggccactatttttctaccactgctctcttctgacctaaactagtaagtacagttttccctttgttacacactacaggcatgatctgcttttatcattcaatggcaacaatgtcttgatatggtcacttggtgtcctgtgaaaattatttcttctgggacacaggtcgtgtttttgatgcaaataaaaaacactgttgtcagggacaataaaaggcttggcttcctacaaatagcaaaattgagataagaaagcaaagttcacgcaacatagctgagtggacaggactcagctgagtgcctgaccacttaggtttcacagctccatctccaccatccgactacccttgcataagttaatgaacctctctgtgcctctgtgtcctcatatttattgtttttttatgtctcttaatttttatgactcataaaaagctttatttttaatttagctttctgcctctgtgcttgttccttcaacacttttgacaacaattttctgctcctcaataaggacagcatgcttgatcccttcacaggcacatttagcacacatgcaatcaccataggccctgctgacatgtttcagtgttttggacaagctcataagattttaggtctcacagcatgaaacgcttgaacacgctgaatacagattttggtgctttccgaagcttcttggtataaaggtaaacaattttactactatgggttctgtggcagctgagtttagtaagaagctgtattgcaggaaagcctatgacgatttgtcaaacactggaccattctgagtgcctctagacatcatccccagaagaggaaaaagctcatctttaaatcaaagaaaactccagcaacgatctggcgaggaatgctttgaagtttagatgtcagttgatatcaagtgcgtagaatccagtatgctcagtaaatatgagctctcatcatcactagaagagaatgttcagagcactgatgcccccatcggctccatggacaatcatcatcgttcctgtctttctgtgacctactcaataagaaactattattgccactggttagttgcatcgttccattggccacgttaagtacattcatctcccctttcttacctagagcatgaacatatatgcagtctctgagactctgttatccctatacttttcaaacctccgtcaattatagatgtgtgtgtgtgtgtgtgtgtatgtgtatgtgtgtataactacaaccttgagagcaatgtttgtccccaaaataaaacaaggattcattctctctgtctgcccttctctgattctatctttcatctttctcattctttcttccatcctgtctctgtctcagtctctccctcttcctccatctccctctccctctctctctttctttctctctctctctcacacactctcctaaaatagaagtatagtattaagaagaaaataagtaactgcctaatttcctaacataaacattttcattttatttcctatggttcccccaactacccgtgtgaacagaattgagaaactatactaccctggaaaatcgaatgactagaaatgagcttgtaacagccaatctttaaatcctttcattccttccctaccctttctcttccttagctacgtaccattcgcctgtgaggctggcatcctggcaaataagtgaatacatagatttacccacagagaagtcatgttttctctgcaactcaattgttattaaatacttcagagccaacatttggtaagatgagctaataaccacccttcatcctaactcctttaattatttgcccttaaactgccaacagggaagaaaagttggaaagccccaaattctttaattgggactgtacctgcaagcattacacttctaaatgaagcctcaaaggctcatacaatggaatagtgagaaatgttgcagaagaagtcatctaaatatgccatgaggagttgtacagcttcagaatccagtggacttttttcaaagggagaatgcaattggggaagagaaagtggaagacagagggtctgagatcatgaagtcttattctgatgagaactaaaacatttcctagaaaccagaatgggaagtcagtttttacaggttctagcatttcacaacttccgaagatgtgcaggtggctaaaactgactttttatttcttaaaaaaaaaaatctacctggcattgcatttgcaagagggctcaggcctgctgctgctttgtgatagaataattaataattattattataattactaattattataattaataataccagaagtccatggtaccattttctcatgagaactacacaatagctaagctttctggaaacttaaaacatctcaaaatgcatggtacacttttttttttcaccaaaatttccctaaaatatactattttacaaggttaattcctagaattacagaggaaaaaaaccctgaaattttgaattcatgcagaagaaatgaactatagtagtttgtactttctgaaagcatattctctgactttgttataagagttccaggctaggcatagtggctcatgcctgtaatcccaacactaagggaggctgaggtgggaggatcacttgaggccaggagtttgagaccagcctgggcaacatattaagaccttgtccccacaaaaaattaaaaaatagccagctgtggtggcacatgcttgtagtcctaactacttggaagctacggaggattgcttgagcccagaatttcaaggcttcagtgtgagctgtgattgtgccactgcactccagcctggacaacagagcaagactctgtctcaaaaacaaacaaacaaaaaaatccagcatatataaaatactttcttatttttctgaccagggtttcaaaaagggaacaacccaaatgtgatggtctacctagtaaatcacaaccatattcatatctataaactcaagttgcttaacaaaggcaaattaggatttttttctctttaggtgtttgttaatacctgtaaagaatgggacacagtggaaacgtgatgcgatatatttagtctagtaccaatctgagttaaaatgaaggatgtaactgaaagaaagaaatatgatgtaaagagagatttatttgtatattatttccctaagacagtttccttctagaaacttctagaagttgaatggctatgcaaaagtatcttcttgtttcttaacttgtattgccaggatgcattgcactgaaaacggtaaagtggaatgagatctctgctttccttagttactctcaaattaacagctggttaacaaaagccgtcttaggtattagtagctcaaaaacctcttctatgtattacaaagccctacaacaagtgagcccaggaggtcaatgaaaatgcaatgtatggacttttcctatccaggcagggctcattttccattgttttatttctgaaatgaagagcatttccaaagctgtttgaggaagctgggctgcttgatgattgaagagacatgtgatgaacacccaagttctccatcttagtcaccacatcagcatcagggatgtgataatagctgtactgtcctaaatgcatactttccaaagattggccttgcttgctgctttctggaaaggaagtgtccaatgcatgcctttcttctttaggaaaaaaaaagctccattatatgcagcttcagtaaacatctccctttggtttgatttcccactcttcagacaattaattatactcttcaggctcctaagagtaaaatctaaattcattactttttttttaaatttatgactttaaacagaaaattaatgttactgaaataaacagaactttagaaatcaagccagtaactgtatcccacccaccccctacaaaacaaaacacaaaattaaaatagcaagtcaaacgaaaattaaatagacaaaaattaaaagccaaaagtgccatgtgattgtgtgtacagtttatcaccctgtaaaaatctagatgaattggtgcaatgcaaataaaacttcaaataagtacatcaattttaaaaagaaatgaattccttttcccccataaaattagaaagtgatagtagagaaaatgagaaaatgttgaaaagataacagatgtgttggggttattctgtttcagactttacccaagagaaagcgattggagaattgcctaatcctggtatcatgtttccggctatgacaggaagagatagatcataatagataaaaatggaaaatgttgtgaaaaaatcaaatacttctaagaaagacaaaacgcaagactcagctgtggtgagtgttaaaggaaatgagtgtcgcaactagatgaagctcaagacatatatttaaacatgttctaatggtggaacagtgagaagaacagctaagaataatggcctaagacagtctcagaaacccagggctcagcccctgactctttaccctcagtgattctccccatcaaaccccatgatctgtctgggcagtcttattctcaacacctcccttgatggaagtctaatctcagcttctagatattctaaccagaggtctaagtcaatcctttctgaaatttaaattcaattctttttttaacctgactctcaagagaaaaattcaggtactttctatttccaattcccttctctaaactgaaacataatgtaacttacttactcttctccccatgaaatagcttacaactttttgacctctaccaatggaataactctcacacacatactcctatgatcaggcctctgataaatattcaattatgttttccacttcttcccagggagttgcctgcaacagaaactgcaaatggcatacgaaagtttcctaattaaaaaataaaccatatgagtgatcatctgcttaacgtcttcctcctcactagaatatagggttcataacatcagagaccctgtctctcattcttagctgacccatggcaagtactgaatatgcatttgctgtatgtctggatcactgagtgagggaatgaacggaccaacacaactcagggcagaatttgtcttttctcataaccccagactttcccatctgttttgttaacttgagacacaacacttcccagagaagtgaacaagctagtactgaggtctggggggccttcacggagaatgctggtgttcttggaaaaacacgatagtggttgaaggaaaaggaaatgcagccatcatttgttccaagggaactaagcctaaatcaaacacgtttgacgactcagatgggctccaaaaacaaatacagaaatatttattacccgagtcgttaggcagatttagaacaagcagacttgtttagatctccttttataaatagagttaagtacaatatgctttttcaaaaatatattttttaattgtaaagactcttgggattgtctggtagagaaaaaaataataaccacagcaacattccttgaaacatacctttctgattactcacgaatcctcatgaaaacattttggggtaaaagacattagtatttagtttaaaaatataatcagcaaatccaggagagagcagcttccctgaagataactccctacactgatgctggggttaaaaggggtgtggaatgttccatcacctcactgacaccctggaccacctgggagccagctgccactctcatctttaacccagacaccaagttcactgtccccgtcaggaccatgatcttaacttcagatatgcatcagaagcagaagaaaaacaaagctgtgttctataaacagtagtagtatcttacattttgcatagtaccttgccatttacaatgagcttctatgtatattatttcacttaaagaccaggacaatcctgtgaggtagacatgctagtactatgaatgcctgtttaatagacgagaaaaatgaatctgagaaggtgaagtgggttgcccaccatcatgtgttagccaggtctagagcctaggacatctaaacctcaaaggagtgggagtcttactaccaactgtggttagatgacagctaccatttgccctctattcaagacagatatcaaaaattagattcagagcctagcaagtaagcattcatctgttaaaactttatttttccatgttaaaaagctaatggaaaggaaagagtagagagggaagtcgtgcttagtatctctgtgtctcagttttctcatctgtaaaatgggtctaactatagaaccaaatgcacagagttgttgtgagattgtaaagaccctgtaaagttgctgacgatggcctcaggatggtagacagtgttcaataaagcttggctattaccataaatgagatcgtccagacaactgcaataggaaacttattttccatctcttctttcacaggatatctggcctgaggtgaatccaaactttaaaaggtggattaattatggcagtaagttaataagtcactatcatgtagattataggagtgttttctttaaattataactaaattaaagagagtctgtgctagaaggataagcacatgcttggaaccaaacagatgaggcagtcctgaaaatcaatctctgctgctttctggtgttgggttctgagatactctgacctcctcgttcttgatccatgtccacatccactgctcatgcttagacatgatgagcctttcttacttccttttatacacagaagtgatgctaaagcaagtgccttcctcttcttttctgagaaatcttgcagtacagaaacttgttaaaattagtttaacccatcattttccaaacttatgtaaacacaaaatgtttaagtattaatgttccacaaacatgatctgggaaacactgcattagagtacaaaatgagcaaaagtcgggaacctcttggataccattgaaagttgacagttgagaggtattatcacctatgagtaatcctgtgacgcaaacccagagaataactttttggctgccccagtgagttcccgagaacatggatgaacctcggtcccaagctttatacaaagttagctttagaatctttccagatactgctggctctggctacatagtagactaagttattatggaaatcttaatactgtaaagcaataacaatgttgaataaaataaaaataagttaaaaatataactgtgtacacaagaaagaaagtaaaatcacagattccagaaataaagagggaactgaaagcagtgtttgtaagcactggaactgaaactggtgagcctagggagggaagaaaagaaagggtttgggaggaaggagattctaatggcttgggaagtgagaatcccagagattggagaccaggtttttggctcactcaaggtgggatgttgacactgagacattttcataaactcagaattttcaaatgaccccaccccaattattctctatccagctagtcaacattgcaaagattttctatgcccagagatcttcatggagaaggaaagatccccatgaaaaataaaaaccctataccagcatgatgcataggttgagagactgccattctactatctctctggtattcaaatcctcagaatgagaatttaacataaagtttgcccagcctggtgagatgctggaggactcacattagcaaatgcaaaaccacttcagagagactctccttaactcaggccacaaaatgtatttctcactgaaaataagtgcatagtaaaaaatactaaaatacaccaacaaatactccattatcaataaactcaaaaaacagaaatatttgaaatctaaagacatcagggaaaaaaatctgaaaaaaactatcaattcaagatgttaaagataggaaagaaagaataaagctcagtaggtaaaaataagactacatttacaaaaaagtataaattttataagaatgaaataaaacttctagaaattataaaataagatactaaaattaaaactcagtagatgagttagtcaacaaattagacaaagccgaagaaagaaatagtgaactgaaagtcagttctgaggaaattatacagaatgaacagaaagacagagattttaaaaatggataagttaagatatggtagatagaatgagaatagctagcatgaagctaataggaattccagaaggagcaaatagaatgtgagagaagtaatacttgaagagacaatggtgaagaattttgtaaaaattgatgaaagttgtaagtccttagattaatttaattagtaaattcttagctgaatgaaaaataaattcacacttagactaaataagtggaacttcagaacatctaagacaaagagaatatgtctgtaaaagctagtttaaaaaatttacaatctaacagccgttagattgtgaagaactgatcagcaacagtagagtcaagaagagaatgaagtaatatcttcaaatggctaaggaatattagtaaattaagaaaaaaatgaaagcgtttgtactctttgacctgcactgaaataattattaaaatatgatctctgtaaagaaggaaattgaactcagaaagacgtggtgagattagaaaaaaacaaaaacaatagtgagtagtgagcaaaggcatttataaacatagttctatctcataaacatgagctataaatataacagtaatgatgatttttatttatataaaagcaaggaaaaaataaatattagaccacaacatgatagactatttggggttttttacagttataaataccttctaaggtatttatattgtggaaaagaagaatagaaaagggtagagataaaatttagtggtttttttttaaaaggttaagtttacttgttaacataagggtggatactgaaaatggaaataaaatgcatgcttcccaaagcagggaaaaggtagggtaggggtcagcacataaagaaaactcaatcaaatatgagtatgaaaattaaatttttaaaaaagaaagtaaaagtataacaaatgcctcagttttaacaaccaactgaacatataaaaagagagaaaattaaccctcatcttgcattatgtggagatatatgtcccatataaattaaaatcctaaaaataaaaagatataagtataatatacagtatatatacacacacatagcatatttttataaacacatacatctctatgtatgtaaatcatatattatatatatatatagctaaaattgcaggatagggtaatgatgtcttagaaaaccaacaaaagaagcacaaaccaaaaggaaaatgattgatacaactgactctattgtaattaaaatgtctgtgtatcaagagggaccattaaaaacttgaaacaagcaaagacttggaggaattattattactttctgtggctgagaaaatgtttcaaagatggctgctgtgatatattccatcgcatcccatatgtctttcttaagtgtgatgttgacactcttcccacagagtggcaaagttcacgtcccatacctttgaccctagctgaaacttccagtctgccttgatcgacagagtacatggagagcaaggctaagtcagttctgaggctgagccacaaaaaacatcatgcacttctgctttgtctcctgtgagacttgctctcggaacccaccaccacactgcaagggagcccagggcacagtggaggggccatgtgtaaatcttccaactgatagcctcatctgaggtcgagtcaaccgccagcaatagctaccaggtgcatgagtgagtgaatgagcattccattaacccaagccccagccactacctgactcagctgcatgaaaaaccccacgtgagcctcctggttgggtccagtcaacccacaggaccatgagagataataataaagttactggtattgtttgaagctacctagtttgggataatttattgtatagcaatgcataactgacacactattcaaaatcaaaaagaaaacaataactcaataaataacatggtgaaaaaaatatgaacaaataattcacaaaagaggaaacatggttagatgacaaagacacaaaaaaaagactcaacctcatttatatataccagaaatcaggtagatacaaatgaaagcaacagcctaagaccattgtacacttacctttttgtcaagaacttaaaactcttaatagcaaatattgagagatgcaagctacagtcatggttaagagggcaggctcaggggccaggctgccaggcatctaattctagttccactcacaaactttgtggccttgagcaaataatataagctttgtatacttcaatctcctcatctgcaaaatgggtttctgcctaggattgttgtgagagttaaatgagttaatatgtatagagtgcttagactgtgcctggcagaggaagcaatgaataagtgtttatgatgacaataatgatgacaacaatgaggaaaacctagaagtcttgggcagttttggtaggactggactatcaagtggtataaccaagatttagagagcaatttttcaattctcttgttgaggtgaagatgtcaatacccttcaactgaaccattccacttgtagaaatgtggcatagagaactgctaggacatgcacagtcagacacaggcaaggatcttcactgtgacctcactttctaattgcaaattctggaaacaacctgaaagtactcagagtgactagaaaaagtgtagtaatgggcattagctcggtttctaggcaaaggagcctccaacactaaggataccatttcattcctggggctgaaggctgtctgatacatggaagaatagcgtgggaacagtatgaaacattgtctgccatccaaacatttggagtagaaacatctcttacactcaggaggaggagcatgaggttgatggtaagggaacccccaagacccagtgtagaaggcaaagctgatgagccagttcaggacaggattgatggtataggacaatcgtttctgtcctgtgggtctttcccatcccaccttagcctttctgtgttttttatattggtacagaaagatgaataaatcacaagtgtgaatcatcatggagtagcacttagaagctccaacttcaatcctgttcctctactctaagagacatggtggggcagcctcggccagggtggtcagtccaattcagctttcatcagtaactagcagtgcagttgcatggcctctgtgagtgtaagtgaaagtcttgagttcaaatcccatcagtgccatttaggagttgagtttcctggaacaggacacacaatcttaataagccagcaactacatctgtgaattgggactagtcatatctccttccaaggacattatgagactcaggtgtttgttaaaacaccttataagctctaacctcaatggcaagattgactattctgcttgtgagagaaaacttggatttctgtgatccagtaattccacacagtgtagcttggatgtcagaaatagcaacaaatctggagatgatttaatacaaccctagagctcccattataaaatttacatagccattttttacacattcccatttttttgtacacataataaatcgtggtgttagtcattggtcttttaggacaagctattaaagcaatagaattcttaattaatttagtgcagagtttatcagttctgtgtacaaagcttactcagagcccactacatcacccaagtgtggggttggataaagtcagctcccatagaataagccttatcttgtgccctgcagtttccagaagcaattcttcctaagctggagatttgttatctgctagccccttggtaatgcatttcctggaataggtcatgagtagttgagtcaaaaccttctatagaattggctcagcactaatagaaaagggtcactatgctgccacgagactcacaaatatctgaatgtacatgtcaaaactagacttcgagtgttcagaaagagacagaaaatgttataagtaaaagaagttttcaaagcatttctgatgtttaaaaactatagagccagtagcattatatggtgtgtaactacagaaaatattttttctaaataataatcattcccatataattatttttcacattgtaccttttcttaagttcatgtgcaaatctagtcatagtaagtttagaatgtacaatacataaaagctttgacacatcctgtcatgccattttaggaagcataacgatgtcccatcactttctctctgcaagggaaccagagtggggggatctttaattcatttcaaacactttgacaaattctacatgtggaaaaacacctatgtctcattttttactctgcctcttcccctctaccatccttaattcccacaacagaatattctttgcagaaaaaaggggagcgaggattcttaagcgaagggtgttccctattgctgatttgttcaggaataaataaaaggcagactatgatgcattcattgctatatctgccccacaccaccctcttcaggccccatcccactccctccatggccctatgctcctcagatgacctcatctccctctttacccaaaactagggggtatcaaagacaattcccttgttcactttccctccacctctaaactgatcttaatcacccttccctccctactactcctccataagacatattattttagtagataacccctccatctgggcccttgattttaaccctcccatctcttttggaccttttcccagcaattactgccttttatcctgtatctctattctatgtctaatggctctactggttccttgtctttgaattataagcaccaattgtcttgtccatattacatgtgtattttagatgtcttatatgtgtgtgtttctgcatgtgtttgtctatattcaaaccctaaaattatcttttttcttcttgttgttgcttccatattttccaaacaagcgaaaattccttcttgccttccttagcatcctattgaagaaactctctaaaaggccacctgtagcatgaaccctaccaaatctccaggcctattttcaatcatcatttgcctggaactctctgagacattttctccccagcaatgcaaagccgtcgtcttcccaccactcattagctcctgctcttgaaagcatctttcctaagctcagaatcatccagcctgtcctcctttccctttgaccactgctcctgattttcttttgcttgtttctcttatttccattttcaaagtgttcaaagaccctgcccaccctcttcttttctctcttctccctcccccacaagtgatatacaagtttttggtttcagctgttgctgccctgtggataatgctgaggcttatttctgaagccttgatcacttcaatggagggcagggcacattttcagctgtcgtctccagtgttcactagcacttcagaggcttccttcctttcaaacttgattctctccttcccttaatcagctcctccttctaatgtccatcctacttttgctaatggcaacctggctggccaattagcctggcctcaaaccgtggagaattttttaacccctccccttttgcttcctatattcaatcagatatcagatcttgattctacctaagtggtgtgtatcctcttcttgccacattacctatgtcaccatctctagtctcttccgttctaatcacatttaaaattactctaaaactaatatttggatgcatgaatcatgtctcttcactaaaatgttcaatgacacctaactgtttataagagtaaactttatctcctcaatttagcaaagacctttgggacttgacttctaactgaatcttgaaatcctatttcctataacccccttcgctaccatgaaactcttatctgtggccaccctgtgttcccctgtaaccatgacttatctatagtccttctgctagaaatgttcactctccatctccacatgtggagatttaaaggatctgtggtgcctttaaaggtaaggttgaataatttctttttctgcaaagcgtttcctaatcctttcagctgatggtaatcttcccatcctttgcagcccaaattattttcctgctgtcaatattacataatttggcccaactgcatccagtagggggaagaaaatagatgcatagatgcatactacaataccatgaatgtgtctattttctcctccgtacttgattagaaggtcctggaaacagagatcatgcttgcttctcctctgtgcacctctttacagtgccctagcacagtaccttgcacttagtagatgctcaataaatgttgatgtatgatatgccatggcagctaagagccaggtttcagagttgaaaccagagtcacgggattatgatcaaatgaactcaagctctctaagcttcattttacacatctgctaaatgcaaatgacagcaatactgcttcgaagaatgattattgaattaaaagtgaaaataatgcatagaaaacccttaacatagtgcctggcacattttatgttgtactattaatgcttattgtgacagtacagaaatgcgggggtttgttgtttaagtgagtataaaacgttgtcatttttctctgggcaattggacaatgggtataatagctttaaaaatttgatcctgcaattccatttctgggaatgcatcttaaggaaatagaggcagttcattgcaaagactataatgagatagaaatgtgtataatgcctaatgaaggaaagcagcacaaatttccaacaggaggacattggtaaactttgaaacatctgtaagaagagacatgaggcagttactatacttgctttgggaaaaaatgtttacaatatattgtaaagtgcaaagtaccgggggtaaaatagtttgtagaataaaattttattctggtgaaagaaggtgcatgtgtcagtagtatttgtgtatgtgtgaacatatgggaatataggacacaaacaaaaatgtttgacagaggcactatatggcatgaaatgatttttatttcttccctgtgctttttttcatttttaaacttttctgttttatactctgaacatgtatatttttggtagccagaaacaaatgttcctatttgtatgtctatttttttcctttttctcttcaagcatgcctacaaataaataataaaacattctttttaacaactcatctccctgagccctgcaaaacagagcacctcctcctcctcagctgttaagtgttcctcatctggactgagggtaaaacaaacttagaatgaataaaccaaggttcattcatgcattcatgacaaggaatgtcaaggcaaaaatcatgtaaagaaactcatcagagccctctgtaaaccttaacatgtagaaagataggatgttttgtgtccaggccagggttgtggaggtggttgaaagtggctcccattggcgactggttgttctgggtggttctgtcaaaagcacagcccactccgtcatcacagtggcaggaacactgggctttagccacaccagaagcattcaacacaacaggtatgtccagaaatggagaattcttggagcttttgctaatttcaggaaggcagggtaaaagagagtgggtagggagggcagaaggttgtcccttttataaaacatttattgatattggttatcaaatcaaattgattattggaacctgagttaaagaataaaaagatctgaaagtagttaaaagaattacacaaggtataggtacaaattatactacttttaaaatttgagctattataagtcctaaaatgataagtaatttatactgaagcagagttaaaccatctctactgtgaaaataagttaactagcaaatggcctggaagatgataacattttgtgctctcttcctgccaatgaacaatagacataaatgcttctcttctttcaagatctcttctgaaaagaaagcctaattcaaagcaacaagttgaataaagcttctatgaaaatgcaagcaaaactcttagactaaatgcaattcagggaccgccacagtaatggatagtcagtgcatcccgcatcctgtctccagtgatagttaatgcatgcagactatgagggggaaaaacctaaaccatatcacttacaataatgtaattctgatgtgagaactcataggcttccttgacctcaatgatgagcatttgtcatttgtcaagcattagatttaattacccttatttatgtgcttatccaggcttcctggacatgatggtcccttctcaacacatagcaaaagcagaatgaccagtcattgggaaatacaactgaaaacccaatttggagatgtatgtctctagtttgacaacatcatctacagctgatgacctgctgttccgagggcagggtagctctccctttcaaaatgtaccccactgtttggctgcctctatggaggtcaggaaaagaaagtcgctggaacacacagtggacaggtgggtttctatggttcctaaatctgttatcagagagctggggggaatggagactccactgcccaagtgcctcgagggcaaaaagaagcctggcaggaataagggaccgaggcagcaggcagggagcaccaacatcatattctatgcaagtgttttcttgttcctcttgagcattcgaaaatgagaaaggggcatgtgggtcgaacccctgaaagatcgacttttaagtgctttttcccctggagaacgtgcgatggagaggaagagaaaagtgagcttgtgttggaggcaggagctatttgaaaaatgattgcttgtctctgggtatctgatgatgttagggaaacaagaagaaaggctcaagggcaaatggaacactcaaccccaagcgaggcctccatgtggggccttctcatctgtcggagggaggctttggggatgcttaattaaagaatcaaagtaggattctcaaattgcttttctgtatccactttgtcctgctggattttttttcttattcaactataaaatacacacattttttgctctttatttatttgttcgttcatttgttttttgagacagagtcttgctttatcgcccagactgaagggcagtggcacaatcttgggctcactgcaacctccgcctcccgggttcaagcaattctcctgcctcagcctcccaagtagctgggattataggtgcccaccaccacgcctggctaacattttaattacactaaaattagtagataacatttctactgctaagtttccattattttctagtctaattattttacctccaaacaaaactaaaataacttcttacatttcaagtgaccttaaaaactgtgctcatggttgatctggagattgacctttaatttgggaaaataaccttatttatgtcaagaacctttattttaaatgaactttacaactccccacacaagtggacacacagtgtagcaactgaatgcatgtttgttgaatgagtcagtgaacaaatgatcatgaaggatgatgattattaaagaaaaaggtggaaacccaaaccattgtctagacatgaaaatgatggacagtttatgcaaatcattcctaatgcaaaatttcctaaggaattttcatgtggttctttcagcttttcctgtagattaaaatcagctcagtcctgacattttaaatcctttctataggaaaggagaataggaaaagaagaaaaccaaacataacacatgcacagaagcaaaactgcactgttgatggagtttagctgagagggtagggtgtgtttagtcctttaataaattgttatcttgtattgttgattaaggcaggacatgaatgccttgtatttgctgcatttttgatatccttgatttcctaagaggacaccgcaccctgggaaaaaagagaggctggctggagcagcaggcagcacacgccattagaggcagctctcggtagcagtggcctttccggcagctggcgtcattataggaagaaatggtttctaattgtgctattgatttttctccctctttaatggattattctcccaacacactctaagttgagacactaccacataccacaggcatgttgccagggatgtatgtaaaactatgcattgcacgcacatggagcttttccctgtgtcttactcagcaggtggaaaaccccaggaaaagggatctcgacagccgtgggtgagcatgtgcttactccaagtgcagcctgggtgagtgcttcacgtatcatttcacttagtcccaagaataccctaatgacgtagggtctgctcattttgtagatgaacaactgaagctcagaaaggtaaagaaacatgaccaggggcacacagctcgtaagacacgggccaaggattccattccacgggagtccaagtccctttatcttggaagtgggtaccagaggacagggtccccacaaacatgggacctgacaaggccctgccctcagaagagcctgtgctttgttcgattctctgcagtcactgtcttgaaatgctcaataatttttggattaggagtcccacattttcattttgtatgtggcacctgttatggccccaggattcacatgttgaagccctaacccccatgtgatgggatttggaaatagagtattttggagaaaattagggttacataagtcatggagatgggacccccatgataggattagtggcattataagaagaagaagatagatttctcaatcctctgctcatatcatgtaagaacacagtggccgtctgcaagctagaaagagaacccttaacagaatctgaccatgccagcactctgaccttggacttccagcctccagaactgtaagaaataaatttctgctgtttaagccatccagtctatgatatttttgttatggcaacttgacctaagactcatatctagatcaagttcacacacaccacaggaatccagcatggtctcaccacaatggtgggtaaccttgaccccacccaccatccacacttcaccttgactaacacatgatagaggcatttcactggcatgcactgtatatggagtgcaagctttgagcaaagcaaaatcaaatccaagcagaatagattcctacttttctgttacaccagcaagaagaaaatgcatgtaacgaattgttcctacattacacttgaaaaaaaaaagtatacaagtgatataccatattaagaaacaaattatttgtggacactacagagtatttgtacctgaatcatgttcaattgaagtgaattccaatcctttgaaaattgggaagccttatgggagctattctacggctttgttgagtgcaagtagtttatttggaaggtgcagaaatgggagaatgaaacagggaaggaggaaaagccagtgaatggatgttactgagctggacagcaatggaaatccactaagaaatcttttagaaagtgcctcgcatgtcctctgaaggatgggaaacaggcatctacctctggctcccattctccagtgattaaaaagtaccttggaaagtgtatctcctccacatttacgggctgctctgtgatggatcttggcactcctgccttcatagaaagccctgaaagaaggaagtccagggatattgagggttgcccttgaggtgggattctatcagcctgcctgggagctgtccattcccctcacagctgaaatcaaaggggatcagcacttgtgctgcatggcaccaaagcatttgctacacctctgatctgttgacccaacagattcatctctcaatgcaattattgttaaatgtgactacccttcagtggttctttgctgtctcctgcataaagaacaaattcttcagcccagttatcaaaggcttcaacattccagataaattttcatccaaattagcctagttctcgtattcacacacaaactctgctctaagaagcacagtctcatgtccccctagacactttcctcacatcttcattcaattcctctcacctgaaagaaactcctacatcttacctatccttccagaactagctcaaatcttcccaacactgtccctatatacctctccactccctgggaacttaaccacactgtgtgatgtgtattgtctgttatcccaataaaatgtatataccttctcaagaaaatgaattttcttactcctcctttatctcctacaatatctatgtcattgcatagttacacattacatcacattaaatactgttaaaatgtgtattcaggaaaccagaaagatgtatggcccagtagttgtgtttttctggttaactctaattaatttctctctatttcagagagtgagggtattgggtgcccaaagtgggttattataagaataaaaaatgatctcataggtagagagaggaaccaaaagcacagctggtccacacaaccgggaaactctcaggaaaaaaaaagcctcctcattactcaatagccctgtggtcttccttcttcctctatttctcactgtctcttgggatttttcctgtctgcctcttctgtctcttcaatgaagtcaatgtagacaccagtcctgcgtctattaggtgcaatagccatcaccaattggagagactctctgtctctgtttaaatttgtaagagagatactgattggtcactggccaacaagctgatgggttggcattgggtcaggtgtccacttctgctccagtcgtttatggcaaacctggtgaggtaaaggagccaagcatggccacctgggccaacctcctcagcagggattatgagaacaagtccttagaaaacaggtccaggagtctagcacatgcgctaaagcatgccatcaggtgtgaatcattaagaccttgaatgtgaataatgtgtgtgaactgggcagagctcatgaaacacgtaataagagacacaattaggatttgctaaatactggtcctaggagagcacagtgtgtatgcaggagcgtttctataccagctgtgctctttcatgcctgtccttccataactgtgggatgccctttacacatcacccgtcatcaaagaccaattcactcaccaaaggctggaaccaacgaagagctgctctgcttccctcacagaaatagtagctcctacagcaacatgtcttcattcattttttattcattcatttattcatttattttattatttcttgagtcccttattcgtgccaagtcttcttctaagttctgaggatacagttgtgaacaaaacaaagcccctgcccacatacactttccactctgtctgaaggagaccatcaagaaacacttatcacatagacacttggtcagctatggagaaagtactaagacaagtaacacagggtaagaaaacactgatagaaaatggtatttagggtggccaggaaaggcctttcttaagaagtgatatttgaatagagacttgtgcaaaggtgtaaagcagatgaagacctgagaaatatgttctaggcagaggaaacaataagggcaaacctcctgaggtgccatgttttgcatcttaaatgtacagcaagaaagtcagtggtgaagagaaggaatggctggaaatgaaatcagagaagtggctatggcccagtttatacacacatttccccaatgccatcttctattgcagtatggctaatactataagtagggctggttttatagacaggcaatcttggagttacacagggacctttgttcacaatggtccctgagttgactcaatgatgttatgtcatcatcttgaaattctaagtttttgagcaaggggctccacaaataggtagccagccctgctgattataattatttgtataaatgttgaattctctcttttttgttttagattttgagttcctgaaagcagaggatgtctgatttattataaatttttatttgtaaacattaattttaatcaccctgataactgagtgccattcatagctcaaaagcagtgcaccaaaagaaacatcaaatgacaatttttttttcaaatattcagagcaaatactactttcaagagggaagtcaccttgtattccactaaatgcaagagtgtttgaagcatgaacatggagtctccattaatatatatatatttttttaattatactttaagttttagggtacatgtgcacattgtgcaggttagttacatatgtatacatgtgccatgctggtgcactgcacccactaactcgtcatctagcattaggtatatctcccaatgctatccctcccccctcccccctccccaccacagtccccagagtgtgatattccccttcctgtgtccatgtgatctcattgttcaattcccacctatgagtgagaatatgcggtgtttggttttttgttcttgcgatagtgtactgagaatgatggtttccaatttcatccatgtccctacaaaggacatgaactcatcattttttatggctgcatagtattccatggtgtatatgtgccacattttcttaatccagtctatcattgttggacatttgggttggttccaagtctttgctattgtgaataatgccgcaataaacatacgtgtgcatgtgtctttatagcagcatgatttatagtcatttgggtatatacccagtaatggaatggctgggtcaaatggtatttctagttctagatccctgaggaatcgccacactgacttccacaatggttgaactagtttacagtcccaccaacagtgtaaaagtgttcctatttctccacatcctctccagcacctgttgtttcctgactttttaatgattgccattctaactggtgtgagatgatatctcatagtggttttgattttcatttctctgatggccagtgatgatgagcattttttcatgtgttttttggctgcataaatgtcttcttttgcgaagtgtctgttcatgtcctttgcccactttttgatggggttgtttgtttttttcttgtaaatttgtttgagttcattgtagattctggatattagccctttgtcagatgagtaggttgcaaaaattttctcccattttgtaggttgcctgttcactctgatggtagtttcttttgctgtgcagaagctctttagtttaattagatcccatttgtcaattttggcttttgttgccattgcttttggtgttttggacatgaagtccttgcccacgcctatgtcctgaatggtaatgcctaggtcttcttctagggtttttatggttttaggtctaacgtttaaatctttaatccatcttgaattgatttttgtataaggtgtaaggaagggatccagtttcagctttctacatatggctagccagttttcccagcaccatttattaaatagggaatcctttccccattgcttgtttttctcaggtttgtcaaagatcagatagttgtaggtaagcggcgttatttctgagggctctgttctgttccattgatctatatctctgttttggtaccagtaccatgctgttttggttactgtagccttgtagtatagtttgaagtcaggtagtgtgatgcctccagctttgttcttttggcttaggattgacttggcaatgcgggctcttttttggttccgtatgaactttaaagtagttttttccaattctgtgaagaaagtcattggtagcttgatggggatggcattgaatctgtaaattaccttgggcagtatggccattttcacgatattgattcttcctacccatgagcatggaatgttcttccatttgtttgtatcctcttttatttccttgagcagtggtttgtagttctccttgaagaggtccttcacatcccttgtaagttggattcctaggtattttactctctttgaagcaattgtgaatgggagttcactcatgatttggctctctgtttgtctgttgttggtgtataggaatgcttgtgatttttgtacattgattttgtatcctgagactttgctgaagttgcttatcagcttaaggagattttgggctgagatgatggggttttctagataaacaatcatgtcgtctgtaaacagggacaatttgacttcctcttttcctaattgaataccctttatttccttctcctgcctgattgccctggccagaacttccaacactatgttgaataggagcggtgagagagggcatccctgtcttgtgccagttttcaaagggaaagcttccagtttttgcccattcagtatgatattggctgtgggtttgtcatagatagctcttattattttgaaatacgtcccatcaatacctaatttattgagagtttttagcatgaagggttgttgaattttgtcaaaggctttttctgcatctattgagataatcatgtggtttttgtctttggctgtgtttatatgctggattacatttattgatttgcgtatattgaaccagccttgcatcccagggatgaagcccacttgatcatggtgaataagctttttgatgtgctgctggattcggtttgccagtattttattgaggatttttgcatcaatgttcatcaaggatattggtctaaaattctcttttttggttgtgtctctgcccggctttggtatcagaatgatgctggcctcataaaatgagttagggaggattccctctttttctattgattggaatagtttcagaaggaatggtagcagttcctccttgtaactctggtagaattcggctgtgaatccatctggtcctggactctttttggttggtaaactattgattattgccacaatttcagctcctgttattggtctattcagagattcaacttcttcctggtttagtcttggaagagtgtatgtgtcgaggaatgtatccatttcttctagattttctagtttatttgcgtagaggtgtttgtagtattctttgatggtagtttgtatttctgtgggatcggtggtgataacccctttatcattttttactgtgtctatttgattcttctctctttttttctttcttagtcttgctagcggtctatcaattttgttgatcctttcaaaaaaaccagctcctggattcattgattttttgaagggttttttgtgtctctatttccttcagttctgctctgattttagttatttcttgccttctgctagcttttgaatgtgtttgctcttgcttttctagttcttttaattgtgatgttagggtgtcaattttggatctttcctgctttctcttgtgggcatttagtgctataaatttccctctacacactgctttgaatgcgtcccagagattctggtatgttgtgtctttgttctcgttgctttcaaagaacatctttatttctgccttcatttcgttatgtacccagtagtcattcaggagcaggttgttcagtttccatgtagttgagtggttttgagtgagtttcttaatcctgagttctagtttgattgcactgtggtctgagagatagtttgttataatttctgttcttttacatttgctgaggagagctttacttccaactatgtggtcaattttggaataggtgtggtgtggtgctgaaaaaaatgtatattctgttgatttggggtggagagttctgtagatgtctattaggtctgcttggtgcagagctgagttcaattcctgggtatccttgttgactttctgtctcgttgatctgtctaatgttgacagtggggtgttaaagtctcccattattaatgtgtgggagtctaagtctctttgtaggtcactgaggacttgctttatgaatctgggtgctcctgtattgggtgcatatatatttaggatagttagctcctcttgttgaattgatccctttaccattatgtaatggccttcgtctcttttgatctttgttggtttaaagtctgttttatcagagactaggattgcaacccctgcttttttttgttttccatttgcttggtagatcttcctccatccttttattttgagcctatgtgtgtctctgcacatgagatgggtttcctgaagatagcacactgatgggtcttgactctttatccaacttgccagtctgtgtcttttaattgcagaatttagtccatttacatttaaagttaatattgttatgcgtgaatttgatcctgtcattatgatgttagctggtgattttgctcgttagttgatgcagtttcttcctagtcgcgatggtctttacattttggcatgattttgcagcggctggtaccggttgttcctttccatgtttagcgcttccttcaggagctcttttagggcaggcctggtggtgacaaaatcggtcagcatttgcttgtctgtaaagtattttatttctccttcacttatgaagcttagtttggctggatatgaaattctgggttgaaaattcttttctttaagaatgttgaatattggcccccactctcttctggcttgtagggtttctgccgagagatccgctgtcagtctgatgggcttccctttgagggtaacccgacctttctctctggctgcccttaacattttttccttcatttcaacttcggtgaatctgacaattatgtgtcttggagttgctcctctcgaggagtatctttgtggcgttctctgtatttcctgaatctgaacgttggcctgccttgctagattggggaagttctcctggataatatcctgcagagtgttttccaacttggttccattctccgcatcactttcaggtacaccaatcagatgtagatttggtcttttcacatagtcccatatttcttggaggctttgctcatttctttttattcttttttctctaaacttcccttctcgcttcatttcattcatttcatcttccattgctgataccctttcttccagttgatcgcatcggctcctgaggcttctgcattcttcacgtagttctcgagccttggttttcagctccatcagctcctttaagcacttctctgtattggttattctagttatacattcttctaaatttttttcaaagttttcgacttctttgcctttggtttgaatgtcctcccgtagctcagagtaatttgatcgtctgaagccttcttctctcagctcgtcaaaatcattctccatccagctttgttccgttgctggtgaggaactgcgttcctttggaggaggagaggcgctctgcgtcttagagtttccagtttttctgttctgttttttccccatctttgtggttttatctacttttggtctttgatgatggtgatgtacagatgggttttcggtgtggatgtcctttctgtttgttagttttccttctaacagacaggaccctcagctgcaggtctgttggaataccctgccgtgtgaggtgtcagtgtgcccctgctggggggtgcctcccagttaggctgctcgggggtcaggggtcagggacccacttgaggaggcagtctgcccgttctcagatctccagctgcgtgctgggagaaccactgctctcttcaaagctgtcagacagggacatttaagtctgcagaggttactgctgtctttttgtttgtctgtgccctgcccccagaggtggagcctacagaggcaggcaggcctccttgagctgtggtgggctccacccagttccagcttcccggctgctttgtttacctaatcaagcctgggcaatggcgggctcccctcccccagcctcgctgccgccttgcagtttgatctcagactgctgtgctagcaatcagcgagactccgtgggcgtaggaccctccgagccaggtgtgggatatagtctcgtggtgcgccgttttttaagccggtctgaaaagcgcaatattcgggtgggagtgacccgattttccaggtgcgtccctcacccctttctttgactcggaaagggaactccctgacccctggcgcttcccaggtgaggcaatgcctcgccctgcttcggctcgcgcacggtgcgcgcacccactggcctgcgcccactgtctggcactccctagtgagatgaacccggtacctcagatggcaatgcagaaatcacccgtcttctgtgtcgctcacgctgggagctgtagaccggagctgttcctattcggccatcttggctcctccccccctccattaatatttttatgaaaactaaaaattcaaaatggaggtcaccctttggaataatgaagaagatataatgggcctcctcactgaatacaaatacaacatatttagagtcacctttgttgttcctttattttcctcaatcttaaccaccactgctgcctacttttattgttcccactgtagaaaatgctgaatatactcctttataattaatttcacaataaatttgaatgcacttgacctctgcatggcattgacaagaaagatgcccaatataaaaacggagggaaaactattcacatctgagtttttcagtcaacccagtctccttatttgttcaccttttatttctactcccagatttccagtgtgcctagaaatggtctccaaactactgcagagctacctccccacaaatacactgaatccatcagaatgtatattaataccaatgaatagtgctccattggaatttcctattttaaaaaacatataaaagaactctcttctctctgtcttctccaccacattccgttttttgacttgttcacattgagctaaacatatgggtaactgggcctcagtaggatcattccttcttaatgtcaaatggaagcagaaatgaataaatttaatatggaaccaggaccaccattttgtgtgactgtagtgatttccaacgaaatatttcaatgctcttcattgctgctgagattttcatagcttggagctttctagtcccaatttatctcatgcatttctattccctagattttttttaaagtaatatgaagtatttaaccctttcctgacccacatccctttcacctccccatctaaaatgaaaaaaaaaaccccaggaaacagccagctagaacaaactctgttcttttttattatcgaaaactatcttacaatttaggcttcctgctctaattctatatgcacatttccagctttctgattaatctgcatttgtggatcagctgccagtgcctgatagcccaagtgctgaaaaactaactgattttcctttttcactcctacctctgtttcagttgtataaccagtgctctcttgctctctctccctctctcccctctcctctctctccctccctttctaccccatctctctctggtcttctttacccccacctcccatccaacattctatcaatggctaaatggttagttccaaatacatgatatctccctaatggatctaccatttttattcccactggcaggccatgcccctgtctgctaggctagtgcagtaacctcccaatggctagctagcctggagtcctcctcaatctcctcaacttccattctgctgcaagtgttaggattctaagaatggtataatctcaagcttttccatagatcccctgctccccatacctactgtatacaaagcaacatccaaattcattaacctggcaccagaatctctctaaattcctttttacttaatctgccatccttgccttacatattgtagtggattgatttgggtccccagaaacgatatgttcaagtcctaccccaccaggtaccatgtgaccttatttggaaatagggtctttgcagatgaaataaagttaaaatgaggtcatacctgaggtggggcctaaatccaatgactggtatctttataagagaaagggaggctgatttggaggcagagatatgaaggagacccagggaagaaggttgtgtgatggcagagggagagattggactaacgcagctacaagcaagggaagatgccagaaaggaccgtcccccagaggcttctagcctgcagaacggtaagaaaataaatttctattgtttaaatcacccagtctttggtattttattatgtttatgacagccctagcaaactaataagccatattttaaaaaggaaaaagaaacaattggaattaattttagcaacatattattggcccaatatagccaatatattatcattttaacatgtagtctatacaacaactattagtcagatattttacattctgtttctggtactgtacagagtctccgaaatccttaggcacctcccaaattcccttcccttcccaagacactcagccttgtctctctgtttctcccaagtgtccaacgtttcaggcaccccagtgagtgagatggagtcagtgagcaacaaaacttaacatcgtgtcgacttgtgtgggattacctgtaatttaatgtttactttttctagtaaaggttaagctctacaagggcaagaaccaagtgtgattattttaccaaagggggcattgatatttcttgaatgcaagaaataatcattaaatgaatgaataagcttgatctttacagcatcgggcaaaactgcatatttgacagatggcctgtatcacattgtagcataataatggcttttccataaatgagtttctgaactttccattagaactttaaaaacgaggaaagaggatctcaggttaaattttttggtatctctcccagtacctcatgtcatccaatatgcatagtagatgctcaacagactataaacaaaaagtatttgaagatatggattgcaatattttttgtctattttctcacccattttgttattacaaatagatgtgagcaaaaataaaaaaaagaaggggagaaagaacgggactccaaaatgaaatggtggccacttacttcttgatttgagtggaatttcttccagacattcaaatggcactttaactaaaatcaaagcctgtcaaatgtgactgcagataatccagattattccaggtctgtgcagtgctcactacttacatctgacaccttcagacactttgtccccactccacccagcaaaaggccagtaattacagactacctcctacctccaaaaagtttgtcttttaaattaatagactctaatttttaaaaaacagttttaggtttacagaaaaattgagcagaaactgcagacagttcccaaagactccccccttgccccaagtttctttttattaacatcttttatcagtgtggtacatttgatactgatattgatacactactattaactaaattccagagtttacattgggaagcctctttgtgtcctgtattctacgggttttgacatatgcatgatgtcatgcatcccccgtgatggaatagtgtcactgccctaaaattcccctgtgctgcatttactcacgcctccgtgtctccctccaaatccctggcaaccaagtatgcatttatgcaactataaaaatgcaggctttatgcaaaatactatgtaactaccttctaatttaatattgacttttccccgggaaatccaaagtattggagatttatcataagtgatcttttcactgtctctatagttttgccttttccagagtgtcatacagttggaatcatacagtgtgtagccttttcagattggctgttttcacttggcaagaagcatttaagattcctccatgtcttttgtggcttgatagctcttatctttttattgatgaataacattcaatcctatggattattccaatatatttcatcacctactgaaagacatcttggttgctacacataaggatgctatagacgtttgtgtgcagggttttgtatggacacaggttttgagctcatttgggtaaacaccaaggagtatccttggtgagtctcctggtaaaactatgtttagttctgtaagaaactgtcaaactgcaaaacgtggttttgattgccattatcattttgtctcctttttttggaataatgatgtttgagagttaatccaacccaactggtcgtgttatacccacaaaaataaaggcttcagggtagaaggaagggcaggggaaagagaaaggaagaaagtgcatgtgagaacataagcttctcaggattttcagccagtttgtcaagggggagggtttcctgtttttctcctctgtgttacagaccaaacgttgctggtctcatcatcacagacaaattaaagcagctgccagcactgctgggaagtcctaaacccagcaggcagcttctcagttgcagagacaccttttgacaaattcgactcctccagggcctgtttggagggaatgtgtgagctgttcagctcttggggcacagcacataaaccagcaacaagcgtcttctctgcatcgtggttgacatgcatttaaccggtgaatctgaacccacatctgttcatccccataacacatggaacatgctatgattgtcaatgccaaaaacctgaagttccaaaaagcagctcctgagagttcctttcctaaacagtctggggctaaacccaaagcatgtgtcccttggtgagagaggaggagtgggctatactctcagatatggggccataatcttagaaacttccctgcctcccacctccaccctcagccgccaacattaaacaggaataacatcggaaaccaaaggagccacccagacaaaacacaatttataatattttaatcactactgggctagacaaatgtcttccaacacaaacttcccacacatcctccattccttttattttactcccacgaatccataaagttcctccatggagatattgcaaaacctttgtgcaaacgggatatagcttccagctctttgtatgatttcgtgggagctttggtacaaaagagtggtttagtatcttggaaagtctccttccaaagagaaatgggatgacattgcacatttaaggtgtcaatctaagactaatttgcaagtgacaccgctgtacagagtatgtcagtgctagaagcgtaggaacctgggtgggatctgcagctggcttctgctgaagcgaagtgtgtgtaaatttggagaaaaagctcagggactatgcatttcagttctctcttctcttgtgaaggaactgccctaagtgttcctctgaagtgtataataaactgaaaaatttatttacttatttttatcagtagacgtcaaaaagaagcctatcctttatattagagttaaaatttgtacctttctgtacctggaaaaattctcctgatttttaaaacaggtctccataccttttataagccacaacaaggcttctttggaggcaagccactgtctggtggtctcagacagaaagaattcttgcagtaagccaggcaagcagtacatatctaacaacatctattcctcctcttctccctaacttaatttttttttcttttttttttttttttgccaggagcaagtatcaaagtatagagccttcaaaagtgctctggattccattacaaagaaaatcatgaataatgcatccccacctcctgcttttatttaatctcaatcagtgagagctagaagtgcattactgtgtccagctgcatccctggctccggaggctggaacctggggctgagggacccacaagccccacaggtgctgtgcaccgcagagccagttaaccagcaatcctgctcaagccccgggagactgtagcaccaagggctcaacccttccggatgtctggcttgccatggatggttcctatacctagggagctgcagaacctactttgaaactgacacagcctgtgtatcccggggttacatctccctttctctgttttaataaagctgtattcctaataaaaggaacaaacagcctatcccacatgctgaaagatcatgacgagaagtctgcccagtctgttatgattcgatgtcccataagctaagtccctctgcactcgtgcacattgagcacgaaatataggcaaattgttatttctgtccatcaagagcaaattatgatgatagctggcttttgaatgttagaaactatagtgtttttcatttctgggagcacatcttgtgtgtcactatgtgctatgcctttatgttaaataacatgtttatgctgggatacaaaacagtacgatggccacataaaaaagacttcataaggtacatacatatgtcatatatcaacatattttaattagtgtaagttcaacatatagaaaaaacagctactcttggctggatgtggtgactgactcctgtaatcccagcacttcaggaggccaaggcgggtggatcgcttgagcgtaggggttcgagaccagcctgggcaacatgacgaaaccccctctctataaaaacaattagccaggtgtggtggtacacgcttgtagtcccagccactctggaagctgaagagaaaggatcatttaagcccagaaggtcaaggctgcagtgagccaagatcacaccactgcactccagcctgggccccagagtgagaccctgtctcaaaattaaataattaataaataaaataaacaaaaagaaacagctactttttgtaatttggaatcagaagttttatataagataacacttttgaaataatcaggaatgtaaatttatgtaaatttagctgggactctgtgttaacatctttttcgttgtgcctatttttcatgttttgccatgctaacatttgctatgtgcccacacacacacgtgcaattcttttctactctattagcctctggttctgtatgtttccatcattaactgaagcatttgcagaacgaaatggaggtttagcactttgagagttgttttatttttacaaccttggcaaagcaagtgtcattgattaaatgtctgaattccaggagagagaaacttggcagatttttgctaggatgttggactggtcccaaccaaagtagagattgcaagcgatggttcttattttaatgtatgctaatagatatcctgtggcttgtcattgggtctccaagggaaaaacaaaaagagtatgtggtgtattggggagaaggataatagtctctgcgtatagggtggagggaggaggcatcctgaagatgagcaactgcttcattcatttttatctcttagagtaacatgtgcctgtgtcagtccttaataactcttgttccagagtgtccccaaatcattattcacttgtttcactagttttggtgaaaaatgatggatcaaggcttcatcctagcttgagatcatttttggatgcttttgctgttttgacaccggtatgtacagctggatccaaggagataccacccttatatagtttcactgcagcccacacttggttttgattaatttattaacccaagatgcccctggggagaggggggttacgggaaacaccttgaattcttttgttttaacatttcagcattgctattcatagaaactaccaagcctttaaatcccctatctgttcttgccagcaaagtaaaatatgtttttaagtgtttgaaaacaagggagagtaaatgtgttttaaatgtatcacacacacacacacacacacacacacacacacacacacacacacacacttttgcccattattgttcctggtcacttcttacatccagaggctgagaacttagacctgccctctgacctcctaaattatcagaggtgaaactcccttttaagcaagatctatatcttggagagtttcctctccctccttgcattccccaggcccatcttttctacaaagtgctagagtgtcagttttatgggatgttgaaaccttcccagtataaattctacccgcattattcttttcaggaaggctctacaaacatttaataataaaagtgaagtgggtgcgactcttagttaataaatacctcatcttgtgggaaacatgaagccttgagcataaaaccagagctatcttttcatctgggcctgtccatcatcacagtgcccaagtgcttaatttaaactgccacttcgccaaaaacccaactgggcagaggatgcactgttcatgccaaccaccgtaaggccaaattattctatttctagcaacaatcaccttcctcaggaatctataattttcagcttatgataaaccttcaatactttggatttcccgggggaaagtcaatattaaattagaaggtaattatatagcattttgcatacaggctacatttttatagttacataaatgcatactttattcaaagaggtgttaaccatatgtgtcccaattcagtttctaacaaatttcctttcacaaaaaagataagaacttataatggtcacgtaatacagataggttgttttaagaggtatgagaaattaagttgaacatcttctggatatgtgcctgattttgtttgcccaagtcttaccctttgagcagatgatgcaaactatatattagtgacttaggaaataatagtattttattataaaattaataattggtcagaaaggaaacatctgccaatatcattctccttcaatgtccttcaattctgaaaaaataactcagatgacatttttattaatacttaaaaactgatacttaaaaaattcttaaaaaaacataattacagtctgaaatataatagattctcaaagaaaagtacacattctcctttcctcttcatttagcatctgttgttggccaaacaacagatgacgccttgccttcagggtaaaaatctaatttgcatgtaggcgcttgaatgaaattaagctccacaaggtgtgaataacaaggggtggcctgctctagtgacaacaggcagctcttctcaaacaaggacgttgaaagcttgttagtgctaactgaactactttgcagcgtatatccccatctggaggccgacatcaaatttgagagtcacaaagaaacacaaaggtcattgtggcaaaccagggccgtggcattgcacaattctagccagaggccagactcctcaaagtctagatgaatggtgccccctggagctgtgcagtgcacaacgtgtgcatctggataggtcagtcctgaggccagccgactcattttataaggcaagaaactgcagcccaaagaatatatatgcctggttggaagttaagcaatgaggcacatttcaactcaatatgaagaaaacatttttgaaacaggaagctgtcaaagatgatgttggttgactcaggaggtagtgaggaccagttacaggacatttgcaagcctaggctgctctaccatctggtatggactttcagagggggcttgaaattaaggtgtgggtaggggctggcctccatagctgttaaggtttttcccaaccctcaactaaggaatccattgttcaaacacaagtcttcaggctactgagcaccaatcaaggtatggggaccctgaaaggcaatagaaatcaaaagatctattttgagagggctctaacttaacaacaggaggcagcaacatcagtgactttctcagctgctacaaaaagtaaaccatcgtcagacacaattttcccattctcccccctgcacttgcgtcatacccaacttccccttcccctcaacactgcagaacttactgataactaagccatgtctacccctctaggagtagttcaagagtcctggtaaagacctaacaggaagtagaaattacatatgagcagcatgtgtgtgtgcatgtgtatgtgcacatgcatgtgtgtggtatgtatgtacacgtgtgtgtgtgtgcatgcacacactgcatgggtgtatttccttaagcctgctttacaaaatcaaaaagtacttccagcatccatattaaggctgtctccagcactgcatgccattgacatgctgtaagtcacatagaggatgaaaccagggttgggcagtcaagaaggggcatttgtaagggctggtggcatgacggctcccatctgttctctcactttcttcagaagtgaaaaattagccctggatggtgttttatgagatactgaaactagaattcccttaaccgcattcataaaactcaaaaggcagggtagcaattagaaaggtcatggttttttggatcttcagtcctgagttccaatccaacctctgccaccttgtactgtgaaacatcgccgagtccaattaaagtttctgagcatggatttcctcatcgatagaacagagaaaataccttctgctgcacagggttgttgtgagaatgaatgagataacacaaaagaaactgtgcctggtaccttagaaagacacagatgcaggtggtcatatttcaaacccacaattccttcttcctgatgtcaaagcaaacatgagcagaaagagttgtacatgaagaggcatggctctctctttagtaattttcagcttatgataaatctccaatactttggatttcccggggaaaagtccatattaaattagaaggtagttacctggcattctgcataaagcctgcatttttatagttgcataaatgcatactttattcgaagaggtattaaccatatgtgtcccaattcagtttctaaactacattcggtctgtcgtggcactagtccaatagcattcccaggacttgttcatgagccagcttcactcaggcaaggcttttccatgttttggttgccccctttgaacaaagcagtcaacttagttacattattaatgaaaatatctgcacttttccccaaatatcaaactgtgtggttcttctgagatgcacactgaagaaatgaagcaaattcctaggtaattcaagcacaaactgaatggaatcctcaaatttcaggcaaagggaacaccttagcatgaatcacataaagtagaaccttgcaagtgtagacaggcttatggcatcctatgccacctatgtgaagtaggaaatgcaaaaggagacgaaagccatcaccccagagaagcagctcattcacagtacaacgatgaactccaaagccaaatgaaatagcattcctaagcttcccatgacacaagatttcctatcatattcctttgagtaccaatgaggtaaattctccaggagaataaaagatgcaggggtttgtggaatgtgctatccagcagtcccacccaggggcactgggacaggacccacaatggggctgtcaggcaagctctctgtctgtccagaaaacaggacctcggtgagcatggttttggggaatgatgtagatggtataaatatcaaccaagtcacatgacatcactcctcccagatcattctactcctctctcagcaccctggcctgtagagaaagaagaaagagtcgcaggaggaatgagaatgtatgacaactttgaggacaaggaaaaaataccccaaataaatgtatgattgcatgtggccaaaaaagaacaaaaatgttgagaaggttttgtcatgcatggtaggtaggttccattcatttaccagggcaggaaaaatgtaagtctctatgatccccaggaatgctgcttctgaattgagcccctgggaaattttctgaaagtgctccagcacgttgtttctcgatcaacttagtacgcccagtggtggtctctttacctcccccaggagatctacaaagaatagataatagcaatgtttcaccctgcctcgtaccagatgtgtggctgcaggaaatttgcatgatctacctaagtcttagtttttcacgtttgtaaagtgggactgataatacttacttcagggcacagttgttgattgatagagggtgtgggtgggcttggcctccagagtatgtcatatataaatcagtcttcatttaggggatttttttctccaggatcaactttactctgtaattctctttgctgttgtcaccctgccccacccagtccgcccaattctgcaaataatagactttctttttctgactcatgatagaaaacttgagacatacaggaaactatgaagaagaaaacaaaaacctatactcccacaatccaaaggaaacaccagtaaaattttcttaggtatacttccagtctaaaaaaaattttacagctaagctcccattattgatataacttttaggttcttttcttttcctatcattttattatgacagttttctcttgtcactataacttttgtttgtaatgttatctgcggtttttgtgtgtgtgattataaaaatgatatactttgcctggaggtcttcttgtttcatgacaagtaatgaagcacctataattgcccaaacccatgatggccaagaggaagggccagctcccaggataggaacaattataaaatgggacttgggaaaacctttcttggtgaagccacgtggcaagtgttttaagggctacataaatgcaatcagcaaagacgcaccatctgagttcccacaccagctctgagatggggcatgaatatagacctgtgggtcattgagcccttgctacaaaaaaaaaaaaaaaaagagagagagcgagctctggaaaagccatgtagcccactaggaagctgaaatgcctgaagtatagctaaaatgcagtattcctggtgtgcttatggtaggtatggttctgttatacaggaaaaagtataattttaaggaaaagatgaaaggaaagcaaagaacatgatctgcaagggctagaagtcttctgaataaataaggactttagaaacagccaatgggataaaatattcagaatgtagaaaataatagtcatgaccaaattatttcaggataatccctgaaaaaaggatgtattttcaattgtatttttctatacacattttaataaaagttgaatcataaagcttatccaactctactcctgcttttgattttgcatgtgactacaaatttcttactcactccattaaaatgactgcaaaatattccagcaagaggatgtaccagaatttatgtcattgtgtgtatggttgttgcataattataaacatctcagtaataaatatctatgctgacagcttggttttagcttcttgttattatacttccaaggaatagatacctagtaggggaactctgagtgaagagtatcaacttttttataagatttttactatgcaagaccatttacgtttcagaaaaatcatttcaatttccacctcccttagcaatgacagagcaagtctacgtgggcacacccttgctaacaatggcttaaccaggatggatctttgctagtttgatgtacaaaatgccattatggtttaaatttgcattctttttttttttttttttttttttgagacggagtctcgctctgtcccccaggctgtagtgcagtagcgcgatctcggctcactgcaagctccgcctcccgggctcacgccattctcctgcctcagcctcccgagtagctgggactacaggcgcccgccgcgacgcccggctaatgtttttatattttttagtagaaacggggtttcaccgtgttagccaggatggtctcaatctcctgaccttgtgatccgcccgcctcggcctcccaaagtgctgggattacaggcgtgagccaccgcgcccgacctaaatttgcattctttaatgtgatttgattttgattttgatttacttgggatttgcttgagaaacatgttttcccgtttgcttactgctatttgagtttctcctgtgacttgtcttcatagcttgtacctattttgctcctggaatttccatgcctttcttgtgaattggtaggaattctttacataaggatgattgctaaccacaatctatctgttatatttgaagcaaataatttttctagttcatttgcctagtaatgtttatagtatttgtgacactcaaatgtctttgatttttattatctaatagcttttgggtgatttttttctattaacttatgcttagaaaagtctttcctaatctgttcacgagatattcacttctattttcttatgccatttttgaaaatggtttcatggagtgttttgagaaacacttttgagtttaagaatttcagaaaccagaatttccattagccacaaaagcagtgttggagaagtgtgactgttgctgcctggatttcagaactatgagactgtcattcattggttgatctttatagcacatgtgctcagatagtaccatccaaggttggtcagggagggcttagaactggttctggtgactacatcatcctctgttcaaataataatcattttcccttcttgaactggaaacatggaaaatttgtattttcagtatccatccatctctacctcttccacatctcccccactttcctgtatttctattaacttctctttcacattgctttatatattctctattttgtatctatctaccttccctattgacccatctatctatctatctcttacctatctacttaccatcttccactgatatctaattctttaatgtctatgagccaatattctatatttatctttccattcatctatatctatttcattatttcatctctatatttccacaataatctaaaaaggtgtctagaactttttattatcattcagatttctacagtgttgattctgtactttatctaaagtgggttttaatccaacgtttgcaacttctagtttccttgcaaatccgctgcattttccccacctctcacttcatattggcctgcatcttaaccagatattcctttccattttagtctgttacgttctcacttcacttttaaattttatgttatgaaattcatattgtcatatcttatattgagaacacaaaacagatgctttgtaaagttttcctgctggtgataaaatgttttactttaatatgctttatttctgtgctatgtgttgaactatgcccccctcccacccaattcatgtgttgaaatcctactgtcctaatgtaactcacaatgtgaccttttttggagacagagctgcagatacagttagttaagatgagatcacattggaatcagagggatccctaatccagtatgaccagtgtccttataaaaaggggaaattggaacacagacacacaaacacggagaatgtcagttgaagatggctgccacaagccaaggaacttccagaaatggcccttctctagatccttccaagggcacatggccctgctgacacctcaatctcagacttctaacacctcctgaagccctggatgtttctggactacatccaactacaaggcaataaatatgtctgttatttaagccactcagtttgtggtactttgttaaggcagtcctagcaatataccctgtgtcatcttttatgttttgaaatttatgtacctggtgttttacttggttggtgctcattattgaccgtcatggttctgtcccaggtagcagtgattgtgtcagtaaactaggctagattttgttattgctgttgttgttttactgtctactaggtataaggaatgtcccctctctgatctaaagacaaggatgaactgatgtccatgtctcctgctccacactcacatccagcatccagcagtcacttgatctgttatggctatgcttcattgagaacattcttcgcctctaccctggggcctgatgacctgaaaatgccgatattcttaaatattttggttcaatgtgttgttattccctttctaatgcaatacatgaacattacaaccttcagaataggtggcttccaagatgttttccttcccagaccatttgttttcccaacttcacccctccctatacaactcacaccacttttcatttctgcgccaggctggatgcattcccaggacctgcagtctcattaaaatttggagatgtttggaagggtatgtctctctgggtgtgacataactaactgttcagaatatctcaaaatgcaacagtcagttaggatgcattggtacctcctttgtcccatgaaggccctgagaccctgcaggaggtagagccgtgatagcaggtgcagtctctcacctccatttctttataggcatgtgaatattcctccttaggtctggcaaccattcatacatagtcctactttttagtcttgttgacatcctctttgcacaactttttggattttaataagtactttaatgtcgcaggaggaaagtacagaaggcctgccatcaactcagagaagaaaaatgctgtttgtcagagatatagaccaatggaacagaacagagccctcagaaataatgccacatatctacaactatctgatctttgacaaacctgacaaaaacaagaaatgggggagattccttatttaataaatggtgctgggaaaactggctagccatatgtagaaagctgaaactggatcccttccttacatcttatactaaaattaattcaagatggattaaagatttaaatgttagacctaaaaccataaaaaccctagaagaaaacctaggcaataccattcaggacataggcatgggcaaggacttcatgtctaaaacaccaaaagcaagggcaacaaaagccaaaattgacaaatgggatctaattaaactaaagagcttctgcacagcaaaagaaaccaccatcagagtgaacaggcaacctacagaatgggagaaaatttttgcaatctactcatctgacaaagggctaatatccagaatctacaaagaactcaaacaaatttacaagaaaaaaacaaccccatcaaaaagtgggtaaaggatatgaacagacacttctcaaaagaagacatttatgcagccaaaagacacatgaaaaaatgttcatcactggccatcagagaaatgcaaatcaaaaccacaatgagataccatctcacaccagttagaatggcgatcattaaaaagtcaggaaacaacaagtgctggagaggagatggagaaataggaatgcttttacactgttggtgggactgtaaactagttcaaccattgtggaagtcagtgtggtgattcctcaggatctagaactagaaataccatttgacccagccatcccattactggatatatacccaaaggattataaatcatgctgctataaagacacatgcacacgtatgtttattgcggcactattcacaatagcaaagacttggaaccaacccaaatgtccaaaacgatagactggattaagaaaatgtggcacatatacaccatggaatactatgcagcccgagttcatgtcctttgtagggacatggatgaagctggaaaccatcattctcagcaaactttcgcaaggacaaaaaaccaaacaccgcatgtcctcactcataggtgggaattgaacagtgagaacacacggacacaggaaggggaacatcacacaccagggcctgttgtggggtggggggagtggggagggatagcattaggagatatgcctgatgttaaatgacgagttaatgggtacagcacaccaacatggcacatgtatatatatgtaacaaacctgcacgttgtgcacatgtaccctaaaacttaaagtataataaaaaaaaaagaaaaatgccatttgtaaaagctgcatcacattccaccacacagacataccctgtgatttttatttattcccctattgctacacttcactttctttatatattttctctacaaagaacatcgctacaaacaaagtcttgcccacactgcagagtatgtcctgagaacagatttctaactttgtaattagtgagaaaaagacatgattgcttttttttttctttttgagatggagttttactctttttgcccaggctgcagtgcaatgatgcgatctcagctcactgcaacctcctccttccgggttcaagcgattctcttgcttcagcctcccgagtagctaggattacaggcacatgccagcacacccagccagttttgtatttttagtagagatgggatttcaccatgttggccaggctagtctcaaactcctgacctcaggtgatcctcccacctcaacttcccaaagtgctgggattacaggtgtgagccaccgcacctggacaggattcttaaaatatactggcaaagtgtttttgagacatccttcccagttaaagttcttaccaacagtttgtcaaagtgcccatttcacttgatttttgataacatgattgaattttttttctgatcatattatatttgaaaaataacatttaaagagacgaatatgtgggagtgggtataagaaagatcgaagggtgcagactctgtgccttccagaagtttatatcccatttggaggaaacgttggtactgcagatgccttgaagaagccaaagtaagaagacaaaggctgaccttcagaggtggctaggcaggacctctctgggaatataacatctgagcccaggccggagtggggagccttatctcagggaagaacttcttcagcaggggaagcaccaatgccaaagcctaaggccagtacgagttggtgagcctgagataaagaatgcctgtgaggccccagtgcagggagcagacgcacagggacttgtggagagcttagattttaattacaaggagccacgttgggagaattttgtttaacagagggataaggcgaggactaaaggagattccatttataaaaataagcctacttatgaaggagaaaatagacagtgaggactaaaggagattccatttataaaaataagcctacttatgaaggagaaaatagacagtcagggcacgaatggagcccgggagcctgctgggaggttgcaacacagtccagaaaagtgatgaaggtgtaggattgactcattaagatgcggagaagttgtcagatgcaggatacattttggaagtaattgatggaaactggcttataggaaacagaggctgaggttactgacctccgccactgatgggaaagactgaatggggccaggaacattaatatttctattgcagcaatggaataaatggggacccatgctgaaaatgtagatgtaagagtcatctctataatctggaatcttagcagaggaagcagaatctcaaggagggcagagaaaatggctttgcccagagcccctcacacagcatgggcagataaaatacagaaaaatccattaaatttgaatgaatcaaccaggtataatttcttagaataagtatttctcgtgcaatatttggaacatacttatgttaaaaaattattgtttatctgaaattaaaatttgaccggaggccctgtgtttttatttgctgtatctggaatccctgcgtgggacattccaataatcctggtggaggaggatttggttaagaagaatcaaatggagcatttgtataactggaagaaaaacaggtgcaatgaatggttagttttatttgtcaacttggctgggccacagtgtccagatatttggtcaaacattattctggatgtttctgtgagggtgttttcggatgaaaattaacatttgaatcaatagacttcgaataaaactaattgctttccctaaggtgggtgggcctcatttaatcagttgaaagtctgaatagaacaaagactgatctcccctgggcaggaaggaattctgcagctgagacctctggactttgaactgtagcatcagctcttctctgggtctccagcctgccagcccaccctgaagatcttggacttaccagcctctacaatcacatgaggcaattcattaaaaatctccctctctttctctctgtttctctctctctctaccacacacacacacacacacacacacacacacacatcctgttgattctgcttctctggagaacactgacaaatacaccaggagtgtgaggtgtcccaggaaggcagaagtcaaagagctttggggcaagggagaactgacttggcaaatatagtccactggtgagcttaacctaacttgtggcatcttatcattttatttatatttatttaatcaggtgtgggattccctactttttcttaatgattacccatttctaagttctttataactacagccttgaagcatggagtagggcctttcttttctgacatgaatatcagcgatttacttttggcggatgcttttggtggcccacgtggcaaataaatataattccaggtggtggtaagtgctgtgataaaaggcaaaatagcagaaaagggagaagctggagctgctgttgtcaacacggtggtcagtgaggagaggacatcagagcagagacctgaataaagtcgggggaagagtgaagccagtatctggggggagatcattgcagacataggaaacagcccgtgcagaggccctgggtgggaacacgcagtggttggtctccccactgggcacaggcagcaaactgctatcagagaacttgggagtcagagttgggtacgttcttgtcccaaccctgccattcaccagctgcttcacgtggaacaatttccttctcttctttcagtgtcagcttcttgatcggagaagcaaatcaggtggataagtaattccttatggtcctggttatccttcacatttaaaggcagagaagtgttgtcgtcattttctttccagcagagtgttattttcagtgactgcagttttgcatttcctatatctgcctattttgagttcacattctaacgtgtgtagaaatcttttgtttagagatttaacattggaaggcatctttggagtgatggagcgtgtttcatctgtgatgaatgaaaaagcttcctgtcctcctatcttgctggagttgtgttttcacacatcctgtgaagggcaagacccagtgggacactgttttcccagagaaatgattagactacaagaaaaaaccagagccatataatttatggcaccatgttaacagcgagcatagtcaacacgcaaagccgactccgccagataaggagttgctttggaaactggccctgcgcaaatcacagacgtagcagtggcacatggatggggaccacattctcttgtgtcattaactaataaagagctcgcagaggaaaagcaaatatcccagttctttttaatgactgctactcaaaataaaagaatacttttgttttgttctattgttgaatttgctagaatactgcaaattctgttgaatttgctagaatactttttatttcaccaagcctaaaaaataaggaaaattggcaccaaaggaagtttctcacaaacttatctttttcaggacaaagaagtaattcaatcagatggagaacaatatgcaaattcttaataagtgaaaaagatcattcataccctgggcccagcaggacagacagaggtacagatgggagcagtctcccttttctctgagctaaaaggcctgaagttatctgcatccaaaacctgggtattatggctaagggaaggaaatgaccttttcaggtttcctccagtctgtttgcaggcctatggtaaagaccagggtgggctggtggattctcaggcaagctccccctgaaactgtggggaggtgattaaaggattaaaatttgcatgcaaagcaatagatattcaaacccttcctacccgccccccaccctcaatgtaacagagaagataaaagctgtttcctttcaaagcttcaggttaaagatggaagaattagccaatatgtaattgtatagcggggcactcagaaagggctgagaggagagaaggcaatgatatccaaatagcaatctgtgcttagaaaaaaaattaacctctgaaaagggagaaatgtcattgtctaaggtggttctctaaatgggggtggggggagagtgatgattcttacgccttcccagaggacacctggcaacagtacaactgggggtgggaggtaggggtgctactggcctctagtgggtacaaggtagaggggatgttaatgcataaggcagcctcccgcagcaaagaatgagccagccccagttggcagacattgagatggagagactgagaaaggttgagaagctgtggtctacggagaaaccctggtctaaggacctattctggtatttattcagtctatctgctcaggatgtttcccggcccatcttgactattcccaaggaacctcaacccaactcttaaagtgaagccccagggtttgccttgttcagccttagtgcctggaacctctcggcctatgaaagccttatacccggggaagcgattggagagaggaatccctgtccagggctaattgattcccccaagaactgtgtatctgctctctttgcggtcaaggagagaggatttatgagacacattaaaacctatctatgtctttctttgtaaataaactgtttagagttctcagatttcgatctaaatagttacaaactttatcaggctttgctgtagtgttgttcaaaataagatcctgcaattatcactcaattgctgccttggaactgagacaggcaggcgccgtgggcacggcccaggacggcacactgcttggagatacaggtcagggagatgcttccactccatgtttccaagagagcacaggacattctttgtaacgcacgtctgtgtgtcctgggagggtggatgaggagccatctgaactgtctgcttcaaatttataagagcctttttgaaaaggagattgtcaggggcttgcagccctggtactgcctctgtcagctgcagggaagacaacagactgttcacacctgtgtgctccgggaaccaggggatgacatgccaccacttgctcaacttgggatgactggtacgagggagtctataaaaagacttggtcttctaattactttaattcatttttttaaaagcatagctgtacttcaatttagcaaccatattcctaaaaatgttaggccatacaagcaaacatttttgtccttttttccatgatcactcccataaaaaaaaaaaaaacaccttttgggcatttttctgattgcttctccacctccttgaaattttgatatgttacactgtgtatctggttatgtataatggtccttaggaaggccacacaccttcacagtagctaggatctcaccttgggggccataccagtctctttgagcatggctgtgctacactgcatctgcccatttgatttgacattgacagtagccactatcaaaaagtattcaagaaaccaggcacggtggctcatgcctgtaatcccaacactttgggaagccaaggtggggtggatcccctgaggtcaagagttcgtgaccagcctggccaacatggtaaaaccccatccctactaaaaatacaaaattagcagggtgtcgtggcacatgcctgtaatcccagctactcaggaggctgaggcaggagaattgcttgaacccgggaggtggaggttgcagtgagccaagatcgcaccattgcactccagcctgggcgatgagagcgaaactcagtttcaaaaacaaacaaaaaaacaaagaagcattcaagagcctgaaatttttttttcagtgatttttaagtctatttttaatggctctttgtaggaacaatggcaagaagattaaaattatctgctagataatcaattaatgtctgcagacatttgtagccttttctatgaatggacttatttatgaaactgatttatacaacatccattgtttaagcttactttttatgtatgcttggaacaatttttcatgtaattacataaattttggacatcctttttatagatgtgtaatatgccatgctaagtatgtaggttatcagatttaaagaactagttttgttggctatttaggctaattctgatgtgtctctattagaaaatgctgcagagaacagatgcagctcatcttcatgattttttggatgcattcatattgtaagatgctaggaattcttttgccttttaattaaaatgtaccagcacttaaatgatccattataagtaaaaaatctcccaatagattaaataaagcaaaatagtaacagatctttgcatgtctatgtctgtctgtgtgcaacttagactttaatttgttatttagcttaaggcaatgtgttcctaaatgctactctaagaacttgtacttaccaccccttccaccaaacacagacaccttccagaggacccttgccctccaatgagatctctattgtcttatattaatttaaccctgctgttctaggtatatcagaagtcccatagagtaggcctgttttaatttcccaagggaccacataaaacattgtacctggtgtgctcaagttcagtgaattactatcaggacttcttggagtcttctttcccctaagatgccccagtttccatgttgttggcacatggccaggtgcagtatcccctccaaacctatgactggatcactgattggaattctccctggggggctgccccttccttcacattctcagctccatgccccgccaccccctcctcaagtaaacagctcttgagatttgacccaggaaaagtcaagtccaacagaaactcccagaacattataccccggccccatttgttttgaaaatagtatcgaagcttacaattgcaaacatacaagtgcttaattattgctcagtatccattttatttctagatattcattgaattccattcaaatgtcgatattagcaatattaaaaatagatggctgcaatttttctactgattatataaagacagacactttaggtaatggtcacatatgatgtgattaaattgttttgctgtcattgtgttaattatgtgccaaagttaaacatattcatctgcaaattcaaatctgcctggatattaccagtaattatggcagtagcagtcaaataagtgtcctcatgtggtcgagagagtgtttgaggctatggtaaatatcataaaaatatcatagtctatcatgtgtttgaaatactatcctctgataaatgactactttttaatacctgtttgttttcctgtgtatgaggcaaatggaaaggaaaatactttttgaatgagcttgttcattgacttcagaaatggtggaaacctttgcagtgtctgcatccccctgctctgtactcagcatggggcagccaccgaaggctcccagcccctcacccagagatactggaagtaccacaaaagttgagaagcagctggtgtttggcaggtgaggcagaggatattattgttattgattattgtatcctgattattatccttcatgccatcttcctggtaaggaggcccttagacaggtaagagcccataagagtagtcaattttgatcttcgtgttcatctctgtgattttctttcttaatctataaaaaatatctttgttgaagaagcggttatgtaccaaatgtttgtgtccccccaaaattcacatgttgaagcactaaccctcaaagtgactgtactaggagaaagggcccttacagaggtaattaaggttaagtggactcataagggcagggcttgatccaataggatcagtgtccttataagaagagacaggagagtgctcaagcactctcttcaccatgtgaggacatagcaggaaggcagcagtccacaagccaggaagagagccctgaccaggaaccaaattggctagcaccttgatcttggacttccagccttcagacctgggagaaaataagtttcagtcatttaagtgagccagtctatggtattatgttgtcgcagcccaagctgatgaatacagaaggaaatgaaaataatggggattctggcttagctttggcacctggattgtctgtcacctgtagatctattgagcatccagctaaacattttgaacctccctgggtacctgagtctgtgaccagtgttggagactcaaagatctgtaagacacagttctcatcgttgataacctacaggtcacatttgacaggcttccatcagggaggtcttgtgattcatggccacatcctgtccccaagtaaagaaccttactgtgagttcctcaaattgttgatgtactgattaatgcacgacctactgacattgaaaaggacactgatttgtttctgaatcatgaagttttgctgatttgtctctgaatcataaagttttattgattgtcttacatgtccacattttagcctgtatgttgcaagctgaagcaatgattaaaacctctgtattgcaccttaaccaaaaggataactctatagaaggagtggctcccttccttctcaacattcctctaaaagccttcctacctgtaacagaccctagaacatgctggactttgtcagtgtgtcttccctggtccatcctcacacttgatttccaataaacctgtggggtcctgataagagtaagattaagattaagattaagataagatgaatctcatttgggagagagccccaggtggggaagaacaataagccattgttctgagagccagccaatcacagacaacctacagacatacaatgaccttattccacctatagtcccctccagctctgctgacacctcgatcttggaagaaccacctaccaacatgggtgaaggcagaggacaggaccttcctttggggcaattgctctggtgcctctgttcaggggaggtgtcacattctaaatagctgagcatgggcaggaagcacgtcaagagtgcccaggtaaaggacaagtgtctagatctaaggacacagtttcccaatgagcttatatcccaggacatcggttttgaatccaaaactgggactcagggtgtgggagacattagggagaaaattagacttttgagagtaatgcccgggaacacccaatgagtagctgagccagaaagctgcagatttgtatggatatcaccaaacatcaagcaaaaggcttttcctctctgaagaccaaaatgaccaatcatagtgatcagccttgaaaacaaattagaaaaggctgtgcttgggaagctgggaggtacgatgatattttagtgccttaaatgtgagtcagggtagagacaagattctctgagttgagtctatgttattcctctgaggcttgttgaccaagggaaagttagaaagttatatatgtgtgtgtgtgtgtgtgtgtgtgtgtgtgtgtgttttaaagttttgctacaactggactacagtccagaggggagatatatatatataatatataatatattatatatatcacactatatacaggacagatgatatatagaagatatattatatacacacacacacacacacacacacactgggggtgtgtgtgtgtatgtgtgtgtatatgttttaaagttttgctacaactggactacagtccagaggggagatatatagatatagatatatatatacacacacacacacacacacacacaaaacatatatctatacacatacatataacatatatatatattatgtatataaagtggtgcaatggactatatgtttatgtcttcccaaaattcatacattgccacggagaggggcttctgggaaaccagtcctactaaaccctaaggtaatagtattaggaggtgggacctctgggaggtgattaggtcatgagggaggagacttcaagaatggtattgctgcttttataaaagggatcccagagagattgtttgccccttctaccctgtgggggcacagggagaaaacagccatctcttaggactgggccctcagcagacactaaatctgccagtgccttgatcttggacttcccatcctccaaaactgagagaaataaatttcttttgtgtgaaagccgcccagtctatggtattttcattagagcaacccaaacaggactgagagaagtagtattgctggaacaggggaaacaataatggtaaaatatacagggtggaggggccctggtctttagagacatcatcttctttcttatccttgggcagaagcagcaggaaactaacaagaacttccagcagcaggtgcatggtgagctcatcactattgcagtcacatcaggctgccattcaggataccaaagatggggcagcttacacaccaggcatgactttctcagttttggaggctgtaagtcaaaaatcaaggtggcagccaattctgttcctggtgagagtcctcttgctggtttgcagatgactggctactctctgaatccttacataaggaagagagcaatcatctctctcctgtgtcttctcctaagagtgctaatcccattcatgagggctccacccgcatgacctatcacccccaaaaccccatctccaaataccatcactttagggattaggacttcaacagagaaattcagggaggggaccacaaacactcagtgcacatcagtaactcacaacttctctcgtagttccctgtggatgtgtggaagaatgggtatctgtcaaaagttagacacaccaggggaaaggaaagcctggtgattctatagaaccttccttgtactcccgtctccaattcaggatccaatggcaggagaatgggcaacaaaatgccctgagaagctcatgaggtcagcacagaagatgccatgagtctcctgtgatgttgggaaaggaatctctctcagtggacactgtggggagggaaggagggtctgggaaacaatgcctctcttgcctttttaaatctaagaattgcacattcagaggggagtgggagtacagtcatgtcatcatctccacatttcatttgataaaggatagacggttttgagtcatagacctttaaatatgcatggggtgggggtggcattagatgaaccctagtctcaagttgctgggtgagatgaagtcaaacagtatcaaaccctttcattctcctaaaaatgagccaagaccatgagctgtaggtaggcatttgctccaaaatgatatattgcagttttgcaactttcctttctgtggctgctgctgtccaaaatgccacttccctcttaagttcttctatgcacagttagaaagataaaatgctaagcagttgaaaagggttgaaaaagaaagatgtaggtttaggtccggagcctggcgcacccgccctaatttgagtcagggaccctaggcgcctgcagctccggttcgggttgagtgcctcctgtcaggatgtgaagctgctgtcccccccgggggcctccagcactgctgaggactcagcagtcagcctctcctcccacttgggctcatttacagagagcatctccaggaatcagtcatggggaaaggggaaacgcggagtgacaacacaacacgtagaaagttctctgccgccttggtcaggcttgtcagcctcacagcccatcctgctcctgcgggaggaaaagtgagcagaactcagcccggagatgagccgcaggccggcagcccctgcctctgccctgcttgttgtgactgcaatgcaaggctctctgtaggtgcgggggattcgggttaaatgggtctccagtggtccagcgctcccagcaaaggccgaccacaagaattagcgggctagttatttaccataaccatatacaaaaccacaagcatcagcgttccctcaaatacatccgagacgctgtatatctctttattaaagcctgtcagggtttgttattgcacagcttggccttgaaccccaactaaaccaggctgcttgagcaaagaaccaagcaatgcaagcattcaggcaggaccattataaccctgaggccaaaggcagaagcagggagaggagacgtcttcctctcctgcctctctcctttcactttcacttcgaattgatttttaactacattcgagctcacgatgatagatggctgtaaaatattttaatcattcataaataaagtatttatcttgtgtgagttatccggtctccttcactttaatgaacacagtatacatcacgctaatccattactatcaatcataggtttcaaggtaggcaatgtaaaaacttagaattgttgtcatcccttctaggcctttggactaagatcaggtttggttgctattcttatctgtttgcttagttttactttgcctcgttctcagacctatttttttcaaagccatgatgtatgcattctagcacattgatgtcattttgagttcaaatgccccactggttaagaaaacagcacaatgtggaattttcagctttcaaaaaggtctttgctacaagacaactcagataaagaatttagcaatagccaagatagagtggtggtgattaagtgatgtaatcaaaggattgcaattcccattctaaataactctctaacttcaaatttgactatggggtgaccaacctatcggggtgtatgttgaactttcctggtttgagcactgaaatttgcatgtcctgagaactccgagtcccaggcaagccagcctggctagtcacctaactatgataaattcagtcttcggcataagtacatactgttaaaacttcatgtgttaagacacaagaaggcaaccatcaatctatggtgtgaactagatggagaagctccccactggtggaacacaggacagtctgtacaaagggcaaactcttgctagttgacttctcctgcctgtcaccaccacctctagattttgagtagttggaagtggtctctgcaggtacttctgaagctacaggaatctctgggccacgggtgtcttcttcagggctttttcctcccctggtagcattcataggctttttcaaacacagggtcttccctttaaaggactagcaagatgaaaagagcaaggctgcccttaggtatagctgcaaactccacagagaagaggacaactctgttctgtcaccaccgccacctgtcctgctttggctaaagctaatgatgactggggaaggaaaggttccctatcttgtggccctggagcagccctgggaccatctctttgcctcttaggtccacaaagcctcctgaatttagtacaatgctggcccctggggtccccctttgaagagcaggatagttgaactttgtagaatgtaaattacacatacagtacaacctcctggaaaaacacagcgtctgaatgccctttgacctcctggatcatgattcctttgtcccctacataaggaaaacagaaaatatgttctataaatagtttctctttcacctttttagaaaaaaagttgaaaaactaaagggaaagaaagaagaggaaaaagaaagtttatcaatacctgtataactgaggaaaccgtttcctgtttctattgtatattgaaaaaccaacttacgaatcacccttgcttgctaaatgatttacaaaggtcagtaatgaggaactccgagacgcaacctcagtttcacttggcagctttatgtggacatcctcacatttggaaacaagaagtgaatttcatctctacaccccttaaaacatccatcaggttaaaataaggagcagtcaatgtaaatgtttaacaaccagttctcggtgggaagggcagaggggaagctctggtttgtagggtccgtggattcccatgatgtaagtactcccaccatgctgagttcaagttaccaaggtgatgtcactgaaccagagttgggaaaacgttctctagggctgggtaagtgaagggtaggcaggtgtcttcagcacaagaggagaaacagaaggaaaactggctagaacagtggttctcaaccctggctgcatatcagcatcaactgctgggcttaaaaaaagtgcccaggccacactccaaccaacgaagttggactttctatgggtaggacccagggattcctgtgattgaaactcctgaggcaattctaatgtgcagctgagactgagaaccactgctctttcacggagcttgagtagtattcccttttgcagaaatgcctcaaatacttctgagacattgtatacctctttacaatagcttgtcagggattcgcagtttagaaactgcaaaaccgtgagtaggatggcaatcattcttgagtgacaccttttggcagggctatgcttgccatggtcatacaaccatgggggatgaaatgaggacccagttgaaagaacgtgataaccccaacatgcacaaagtgctctgaggcctctcagctaagagatggctgtacttttcagcctgctttgattgcaatacaatctgtaggtgtggtgatttgggtaattagatatccagttatatgcaatatattctgttttccttttcatttaggctaagacattgatatgagtgactatttacctgaagcaagtaaagatattggtatatattatgaatgtagaaaaggtgaaaaatgctagaaatagcacaaaaactagagaaatgtcatgatataactcttaatgaagtttctgacacgtgtctatggtgtgtttaataactgtgtatgctgtatgttaagtatggagagaaccctatcaagattgagagaactcttgttttggttaggcactggggagaaatgaatctaccacttctgcgtttttaagaaaatgtcctaatcctaacacttcgggagtccaaagtgggcagatctcttgagtccaggagttcaagatcagcctgagtaacatagcaagacattgtctctacaaaaatttagccgggcatgctggcacatgcctgtagtcccagctactgtagaggctgaggcagggggatcgcttgtgcccaggaatttgaagctacagtgagctgtgattgtatcactgctttagcctgggtgacagaatgagacctggtctccaaaagaaaaggaaacaaaagaagaggaaagaaaagagaagagaagaaagaaaagaaaatgtttttgttgaagtacatgcacacatagaacagtgcaaaaatcataagtttatatctcagcaaattttctcaaagtgaatatatctatgtaacccccatgccagatcagaagatggacatcccagtacaccaggaccttcacttggccccacctggcactggtcttctctccttcatgtaaccactatcctgatgggtgaccacacatcagctcccctggtctttgaacttcatagaaatagaatcatccagaatgtacccttttgtattgggcttcttttactcaacattatttgtgagctttgtcaatgatgtgacttgtagcagtaattcattcattctcatttttggatagtattccattgcatggattatgccccaattcatttatacattctgctattgatctaagttttgacacttacaaatacttctcctatgaacattcttgtacatgtcctttggtgcatatgagtttataatgtgtctttgttttaaatttctgtccaataaaactctgtccagtgtctggtgaagctgaagttcacatagcacttcaggttatgaccaaattgccactgatgacctgtttttaatggtcttacaggcaaggttgttatattttcaaagccaaaaggtgaaaacgtgaaaaactgcctgaatacttagcccctagcatgggataaagaacatctgaaaggaagtcagaaagtctgagtaatttgaaaaagtgcaaaaagagaccatgtaatccatccaaggtgatatggtttggctgtgcctccacccaaacctcatcttgaattgtagttcccataatccccacgtgtcatgggagagacctggagggatgtaattgaatcctgggggtggttaccctcttgccgttcttatgatagtgagttctcatgagatctgatggctttataagggacttttccccctttgctcggcactactctgtcttgccaccatgtgaagaaggacatgtttgctttctcttccaccatgattgtaagtttcctaaggactccccagccatgtggaactgtgagtcaattaaacccctttcctttataaattacccagttttgggtatttcttcatagcagtatgagaacaaactaatacaagagggtattatgtttgaaaggagccttagagaggaatggttctcttttttactgggtgaggaaactgaggcccagggagatgaaataactcattcaagatcacataggtagaaagcagctgaactgtgccagggatcttttcaactcctagttggctacttctataaaattaaactgtctacacttttagagctagactgatgaattttagaacgtgccagtgtaagtcaaaatgtgaaagaggagaacttgtttcaaacaccttaaactgaatttctaccccaaaaagaattcataaacacaactctctgtctcttgatttcctctgtcctcactcaagctgcttcccagtgatacccaaaatccaaaatccaccatggcctcctccaatttgttctccaagtggacagcatggcctttgcatatgtaaatctgatccctttatgcccttctaacacttgtattgttcttaggataaaggtccaaatcttcagggtgccctaaaaggacccggagagtctcattctttccatttctctcctcctttggaatgctggaatgctggaatgctctcctcctgtgctatgcctcctttgactacacctccaacaaaccctgccccatgaagccttctttcccttagaagctggtttaattatcacttccttgggaatcttccctaagttcctgacttggtccatgtccctattacaccaggcacctactcttggctgcatccgttgtagctgtaatactacatttacttatctggtctgtccttcaatttgtgttggtctcccttcttagactccatgaaggtagggtcacatctgtttttgctcatgatacctgatcctcaacaaatatctgtttggtgaactaatatctgaatgattgttttctagtactttctgtttcatcatttgtatttgtagaccatcaaaaacaagtctgatacgtttatcagaattttacaaatttaccactatttacttaaatatcaataactatcaatttagatgaagaaatggaagataggctaatcacattttcaggtaacaaaaagttggaagggacaactgggtagaagaatcaagattgtaaaagtttagaatgacaaagtaaatttgagcaatcttacagcatgcacaggacaaaatagcatgtccatttttgaagttccagaggtgaataagcatggttcctgaattgaacaagctcatatctgatggaaatataaaatgtgagcatgaccttacaacaacacttcacatgcttccatctggtgtgaaattataaggtctctaaattagcactttttccccagggttaggcccgattatatggaactaccagacgtaagacagcatatgatgagttcagcttcattcttgctattgaagaaataatttttcaactgctatgaggttttcaaaaacttttaaatgtgatttggtgaaattttttaatctcaccagaagagtatctggacatttttctcagtcaaatatgacttcatcaaaaatatcacgtacatacatttaaaacgtctatgacacagctatcattctgagtgcacttctccctgcaactacacctggaagtctcaggggttcttacctacagtaacctagggcataacctggctggtcctcacgcctggcagtcaccaagatcctatctagttatctcttagtagatttctccaaaattggtgccagctaccaacttatacacaccccagtccatatacctctaggccaccattaattgtactgaattgtcaccttgattcatgaaaatacaaaacaaaaaagtaattttttaaaacagattacagacacaaactctgatgtaagtagtaataatgtaatacctggctgaaatgctgcctttgtccacgcatggatttaattaatatagtctctcccctctagggtggacagaaatatccagagctgtgctatgaattacgtacatggaagttgttatagcctatgtttgagaaccccactccatcatcaaaaagaaagaaaaaaaaaaaaagagacccactctccattacagagggaattgcatagataaccctggccaggattcacggagagataattttatttatgctggtttcttctttccctcctttagctattccccattgacttggatataactaacttcctttcctccatatcccacaatttggataaaataggcaaatccagctttgaaaagaaattgacactagaaatcaaattcaaacaggaaattctatgatcaacttatttaaagtattaaaaattatgttccaattttcaatatatggtctccccagataaagttgaaggaatgagatttggtcccattagattgacaaaacggaaattatgtttggtgatatgatttggctgtgtccccatccaaatctcatcttgaattgtggtttccatatgtcatgggagggagctggtgggatgtaattgaatcatggcagccatttcccccatgttattattgtgatagtaatttctcatgatctgatggctttataaggggcctccccagttgctcagttctcattcttctctctcctgctgccatgtgaagaaggacatgtttgcttcccctttcaccatgattgtacgcttcctgaggcctccccagcattgttgaactgtgagtcaattaaacctctttccttaataaattacccagtcttgtgtctttattagcagcatgagaacaaactaatacatctggtaaatgttttaggagcagacaatagcctcttaaatatctctgaaaatactagaaagtataagggaaaccaaaccaaaaactgtgctgtagaaatgtcttgcggctcttattgcttaaaaaaatacagagcattcattattcagatttgtgtccgttctattttaatgctatccaattagatgttcctcctgacaggagttggttccatctaataaattcattaaattatgtcaacacttatatgacaagacttgcaaaatcttgttcagtactcccattacacctcgtcagccctcatgtagaaaagaggacatcaacaaaaattgaaagccaaaaatcttcctcataagaaaaagaagttaacgtttgaaaagtcagaaagattaatattttctcctcttttgtggatagtctcatacccttggggcctcattttcaaactggctaaaaatgaaaggatgaaagagtccacaaatgcatagcataattagtgtggatttactgcaatgagacattacaacttacagagaccctctctctacaaaaaaaaaaaaaaaaaaaaattagccagtatggtggcatatgcttgcagtcccagttactggggaggctgagggggaggctgaggtgggaggatcgcttgagcccaggaggtcgaggctgcagtgagctgtgatcatgccaccgccctgtagcctgggtgacagagtgacaccatgtctcaacaaaaagaaattataacagagaaggcacaaagccttcatgctagaccaaagaagaaaaggaaacttttacgtcattgtcacctcctaatacagaagtcctagatgaggcctgaccttgctctttaatgccctccttgggggtctggtgacagtcagcagccagatgccatccaagaagggcttagccctttatatctgtttacctccacaaaggacctacacacacaagtatttgcgaatgatgctgtcttccaaagcctcctgtgctgtatgttgctctacttgcttgatctcaggtagattcagaacaaaaactgagagttgattcttgaccagacggagggttattctgcaggaattaggaagaccctgttgcaacatttaaatgtctaggtgatagaagatacacaaacagatcagaacgtaaaaatgcacgtggactgtgtatttggtgatcatcaccacataaactatgtgcacatattaagtagaaggagaaagcaattctggagtgctgggctaaagagtgttccctttccttttttcccccaaattttattttctaaaatgatatcggttttcttaaatatgaaagagaaggcaagcttcccttccttgacagcttttacttagaccagcgctgtacaatatatatttttcattattgtatctctaaggagcctttttagacatttttaaaaaacaaatctccctcctttttgaaaattcaatgctacatattcactgtgtactgtatgcatatctgtggtttaggcataaaaatagtttttgctccctcccaccaagcactgtttttgtcctcttgagagtctagaatttgagtccagatgggcatctgagacatgagtacatgtaacaaagtaaggtagtcttacctttgttcattgcctggaatagacaactagatattggttttagctggaggcagtaacaagtgcgctaagattaggggattgctgctgatttgaatgatcttccagggacccaatccgtgtggaattaacccgaaagtttagaccctttctgatccctctgatgagggtcaagaggcccatggtcagcctgaacacctctgatactgcccttgaggcagtcccaattcccagtcaccccctgaatgagcattcatgttcactgatgagtgttttcccagagaaaacagcccagaatccaccttcaatcagccaccctagcagctacctggaagcagaggcccgaaagattagtgctcaggggctgagacttcttcagggaagcacaacctggatggctttgaaatgactatgtctggaacccgcacaacttactattgctgttgcaaaagatctcatcaaacaagcttcctctggagggaattatgcacaaacaatactaaaagaggttttaaaataacttcactttttgggagaagaaaaagagcacttaatttctggactttattgaaagtccctgtcatgtcttcagaaatcccttcatgggctgttttatgactccatcggcagattaggctcttcctgctccacactaattgctaagcactattgcctaataattgtgccattaacctatgtcagcagtgtaactattgtgattcccatgccatgctcagaagagctgtttcatctaaccttttgaaagtagaaaatcattagacagtggaatctatttctctttgaatagttgttaacttacacttgcccaatgatattaatttttgacacatttctattttgatgtatttacttagcaaaatggaatattgaacctttctgctttcctatgtacatgcatcgtttactatgtagtcatcaccaaattaaaaatggaaaaaaataaaataacctcagttttatctctcattaaaaatagaacatagatcttaagttataccctctttgctgcatactttcatctatttatttgctgtttataatagtaaagatggtcactcttcctggatgtcaatggccaatgaggaatgcatggccttgggctgttcttcagatcaacacggaattcccaaccaggctctaattcctgcagaagtgccttgcccttggatgcttgtgcttaaataatccacacatgactctcttaaccaagccaaatgcacttctttcccattctggacaccagaggtagagaagctcaaatcctaccctgtagtcaaaggctgaggaataaggtaatttaagacttcagtggttgttccaacttacagcaccatctgcaaccccactggagacctcaaaactatcagactccacagacagtgctaaactgcaccctgtggatgtgacacgaatacagtttttctttcagtgtcacttaacgtcatgtgttacaaatgcttatgatctaatgcattgtattaaattttgaaacattagaagcttaaaaactctacaaaacccttatcatgacatgtatgtaggctgtttccataaagtcaacagaaattaaggggaaactacaaaatgtaagtgacaaaaaaagtgttaaataatacaattttacagtaggcatagaaagttatcacaggaagggatcttggagctctgtggttcaatttctccctgtccaggtgagtgcccaatggtgcgatgacttgtaaggtcatgcacgggtctatggtgtatcccagaattgtacccaaggcccagagcttcatgagcagcaggtcttctcatgcccagtctctcaccgtgggtgttctaacagaggcttccctcacttctggacagaatcatggctctttctctccatctgaatgaaggcttttcatcccatctctttccctctgggcccttccccatgaccactcccttctcctctcaggtatgttcaagcacaaacccatcccttgctctgaggatctcatccctgctgtgtggcatttccagccatacaccttctctttagctgatgttttctctaattcctttcttgacatccttcattatgagcttcatctaaatgaaagtcgccttttcccattttcaccctcctgtgtctgtaacagcttctcctgagttcccatctcttaaatattccacattttcacattgaagcatcagggcagtgcagtggttatagatatgagccctgattcccacacgtagcctttctatgcctcaatctcttcatatataaaaagtgaataagaatagtacccagctcattaaactgtcatgaggaccaagtggcagaatccacatgaaatccttaatgttcttcaattcttattgatcagaaatcacccaggggtgtcaaatatcatccatggactaaatcctgcatcccttctattgttttcccttcctcctatttccaggttccagggaattcccatacacactacctgtttacactgaccctcactataaaaactttttgttggccgggtgcagtggttcacgcctctaatcccagcactttggtaggccaaggtgggcagatcacgaggtcaggagatcgagaccatcctggctaacacggtgaaaccccgtctctactaaaaatagaaaaaattagctgggcgtggtggtgggtacctgtagtcccagctacttgggaggctaaggctggagagcggcgtgaatctgggaggcggagcttgcagtgagctgagatcacgccactgcactccagcctggggatgaagcgaaactccgtctcaaaacaaaacaaaacaaaacaacacaaaaaaacaaaaaacaactttttgttgaaccttgccttatcattaaaatgtgcctggtctgtgatccatcctgggggaaccaattataagattatcttgttaatttaaaaagaacatttttaacctaaagtgttaatgccagatgtcagattactaattattgcagagccatgtgaactaaacagggtgagatgtgtgggaccaagggggtagttacaagcacctcacaagtcatgccacttttcaggtaaaagtctcccccacctgcaggtcaccagtctcccagtctctgtgctgattggtgcatttgtcttgcctcccttaataaattttaagttcaagggcagataccatggttaatccaaatgttgttatcccccttcagatgatgcaataagtcatcatgaccataattatcatcatcatcatcatcagagagtcagtaatagcaggcacccatattaatcaataactagaatgcagaaacactctaaaatgcagataaagcaaaggaaaagatactattgctaccactaacacccagaaaaaaatctaacttatcaagtccgtcttgctcatctctggttttatgacatcatgaagtaggcaactccaaaaaccacatgatgacaagtagcaatgcaaagcattatttgcagtgacattagcatcattcagggttccatctgggtctttaatctgtaaaaatgcattaacaccaactaactgtagtccacagtccagccatagatgtttcattcatgtaaaatattgacatgtcgacagacataattactgagctttgttgactcagagggccagtaggattcttccagcgcagtctgaatcaacagtctggcggtgtttaatagcccctataaggagctggtttcacaaagagtgtgatgattctgggtgaagaggaaagctcataggacctgagatagaatcacagagacctgatgtgatgtagtggctttgttttttagctagagttttacagttcttcatagggaaaagaaaataagcaatccattaaacattagcagcattatttcagagatttcaccaagccctatctaaggcatgtcctgcccagcaaattgtgcatgctaagtgctttgtagggtgcctggtacatcattagggcccagtcaatgtctgatgctgtcatcacttcttgtctcctctatacacatggaaaagtctttttcatatgtgatagcatttcccaaagcaaatattcgtacccatgtataattaattatatacttatttgtgatattgtgatataataaaaaaatatctatctggtcttcatccctggttcctagcacagagctcctgtctttgtgcaggctgctctaacaaattaccataatctgggtagcgtaaacaacaaacatttacttttcaccattgtaaaggctaggaagtccaagaccaaggtgccagctgatctggtgtctagtgagggccctcttgctgatttgcagatgactctcttcttgctgtatcttcacatggcagagagagactcagcaagccctcttcatataagaacactaatcccattcctgaggattctatccccttgacctaattaccttccaaaggcccaacctcctaatacaatcacatcaggagttaagatttcaatagaagattttggggagggaacacaaaccttcaatacatagtaactcctaaaaccctataatttcctgaatagggtgacaggaacatcttttgttagaatatttcatctcagtacccagttcctgacataagaatttctaagacccttggaacccccagagtgataagagtgtccttttgaatgctaacaagaggactggtggttggtggctggtggctcctagataacttcaggatagagggacagaaagaccaaggcatgattaaaaggttgaaaggttgtacggcgccccaatcccctatctccagagagatcagagataaagttaatcatcaatgggccatgattcaatcaatcctttccaagtaataaaatttccatgaaactcctgtaatctacagatttcagataacttccagcttgtattcacatgaaggtgctgggaggatggtgcacccagcatgggcatgggagatctgcacccttctcctctgtactttgtccaatgtatctcttgcattgactgatcctgagctgtatcctttatcttaaacctgtaaccataaatgcagtgttcccctgagttctgtgagccattctagaagttatcaaacttgagaaggaggctgtgtgaatcttcaacttgcagctgattgatcaaaagcacagttggaaatctgggacttgcaactagtgtctgaaatgggggaagtcttgtaggactcacccctttgcctgtgggatcttcctcagatccaggtagttagtgtcagaattgaattgaatggtaggatactcagtttgcatccagggagttggagaactaattggtttgggggaaaacaaagcagttcagacggtttgatttttatagcttaatatcatcatgataattacaaaagcggcaccttggatcacaacgttctaatgtagacatggcagttacaattaaaattagttcattctacacttatcacctgccaagttctatgctagatccattgaaatagtcacctagattggttaagggttattaaatttaaaagaaaaaaataaatttaaactaaaacattgtctgaaactaaaccaggttggcacgccctctaagaaacatcacctggtttggtgcatcctcgcagaaagagagccatacagtgaagtggaaacacacccaaaagctctgcaatattcctagaagttctcgaatctcctccttaacagagctgcagaagggaaacacagacaggaagcacctgtttgactcagacagcagccctaatgcagtgccactcaggagcattccctcatttgaagaccccccaattacatgaaattatcaaccccattaaattccagccactgccattaactatcattagggctaaatcagttatctgatcacatcctgaaaaagtggatttcccgaataaggacctcccaattaagagaggcgtcctatatcagaaagcctaaattccctgagtagtcacttaattaccatatctacaagtttctaccgtgccgatctcaagtacaagttgcttgcaaagcaatggaatgaagccagcagacaggcagagagaggaggcgcattcagttatgggtctaggtaattaactcttcaacaaacaaccctggcactctacagagttgctctcaccatgctccacccttgttgcagaatctgctcttgtatgtagatgagcatttaacctaggcatgtttccatagggcatcttcaaaatcagtgcaaagtataaacccaacccctagcttgcttgttggtctccacacttgacacataactcatatcgccttttccaagcagtgtcctctgtgggtgtgccttgctataaataatttctacacctagacatggttcttatatttatgtttcttacagcactgaacatagcgtcttgcatatagtaagcacgcaacactttctatgagtgactgaatcatgaagctgaatatgagattttaagcccaaagatttaagaaatgtaaaagctaagtctctttctggagcggtgttacaccaagatgatccataaaatgccaaagagtaagatgaatttttggcaaacactacaagtctattatgaaacagcttatcataatagacttggatctacttgagtctaatcgtatctcccttaatattactaaaagcctaatataatacaactagcctataatccctgggtatcctacaaacaaatcaaactcaagtttctaaaccaggacatgttatttttcctttccattttgtgtctcctgtgtatttctagactctgttaatggagtcaccacttaccaagagcgccaatgccagaaaccttaatttctatcatttctttacctgcctcttgctgatcctccctagctctctcatgtcccattatatctattcccatacgtataagcgttggcagatcgtttctttcattgccacctcggaaatgtccctcaagtccagcttgttctagcttcacaaccactgtcgcagctcagacccaaattatctttccccagatgactgccaacagccctgcttccatgtgtccctcaacgacatcattcttcctactacatccagggtaatcttcctcaattaaaaacagagaaagccaaaaagctggatcactctattctcctgagttttttttttttttttaaaaagaagaaaaaaatcgagttattgcaagataaaaatctacagtccttcatttgtcatcaaagctctttgcaatcctactcggatgggcccaggtatgtgcctcatcctgcaaaatggaacaaccatgggttcttcctgtaaggcgccctgatcctgtttgacggggcccttgtctctccaccacttgttacggtaagcagaaagttttcccacatttaaaaaaattccagtaggaaaccttttccagaggtatgtttctaatacgacattccatttcccttatttctgcatatttttttaatggcacctttgttgccttgggtggcttttttcctaattgctcattcttaagcagctgaagtcctcaccagacctgacctttgatggcagacagggtgtgaatactgctcttggcccgactccttgctcacttgcccactgtgtgctggagaaattctcttcttggatgtggagctcaagattgctgtataaagctcctggcccaagccaatgtccatcaggttgtcttttcttctctttaagtaaaatgttttaaggtataatttacacaccacacattttaacatatagttttaaaaaatatttttatcaatacctaatatttgcacaaatctatggaatagggtgacattttgttacatgtatagaatgtgtagcaatcaagtcagggtacttagggtacccatcacctcaaccatttatcatttctctgttttggaaacatgtcaagtcctctctcctagctatttggaaatatgcaaacattattattaactatagtcaccctatcctgcaatcaaacattagaatgtattcacctacttgtataagcataaagtttgatgagttttgaaaaatatgtacgcccatgaaacctacactcttattaagatatagaacatttccattaccccagaaactccccctgggcctccttacattcaatccttctcatctcccacccccagcaaccctcatccactttctatcatagttttgcctcttcctcttccagaactcctgtgatggagtcatttacgacgtggtcttttgtccccaacttctttctcccagtatgtttttgagatccatctgcatcactgtgtggcttgccagttcattcctctcgttactgagcaggatttcaatgtgtggctatatcgccttgtttctccatttacctattgatagatagcgggatgtttccagtttgaggaaactagaaaatacatgtttttgtagaaagagaaaaataaatcatgggttcatatcatatttcgaacttaaatgaaaaagtataggatttccacttgattagttgattttattttgtatctccaggatgcaaatctgattttctaatgtcattaacaaaattacttatttccttgtcctacaatacatttatatgtatatctgtataattgtttgaagtaacaatactgatattattatagaattattatagaatgcagtttaagatttttctttatgttctctccttaggtatgtcccacatggaatatacaattaatttctgtgatgtcatacagaaatttctgtgctgtctctgcagttttaaaatttcattttgatgcataatgtttagttccataaaacattcacctggttccaaagtcagatctatatagcaagacctattcagaaaggtctagtgtctaaccttgtcccaacatttaaaaatagtttatttatcattctactggttctttgaaaaaatctagacatgtgtgactatctatgggtattactcgtttcttacacagaatgctaaacacatttatatggtttggctgtgtccctacccaaatctcatcttgaattgtaaccccataatccccatgtgttgtaagagggactcagtgggaggtaactgaatcatgggggtggctcccccatgttgttctcatgatagtaaattctcatgagatatgatggttttataagacgctccccccttcactgggcacttattctctctcctgctgccctgtgaagcggtgccttctgcaatgattctaagtttcctgaggcctccccagccatgtggaactgtgcatcaattaaacctctttcctctataacttacccagtctcgggtatgtccttacagcagcatgagaatggactaatatacacatgcttcttcaccttaaaatatacctagaagattacttcatgaaaacaaatcttcctcatttttttacacagctgcttctgtatggatgtaccacaattaatttaaccaatcaaccaacagctgatggacatatgggttgtttctagacttttctgtttataaaccatgcttcaataaataatctagtgcaaatatcattttatattttgccagtatctttgggattgtcttcctgaaatggtactgctggttcaaagggtaaatcctcgagtactctaaatagtgccaaatttccctctacagagctgtgtcatgttgtactcccactagcaatgcacaaagtgacacttactccagccttaccatagaatgtgttgtcaaactttttcatgtttaccaatcccatagttgagaaacagcatctcagtatagttcgagtttgcattttagccagttacccttctaatggggaaccaaatcatttttccctcgacatctgcattcacacctacagatgttttctaatctccctttgctggcacagtaatttctgttctcccccaaaatcccccaccccctcatttaggaccacagactaggtggaatttcaccacctgactctcccttccatggtggaaccaagcttgcctcaaatgcagttctggagcgacagtatcctgggctagaagcaatgggaaaggcaaaaaaatgcaactttgcaactctttccagaaatatatttttcaataattatagatgtcattactgttacatcacaactttcattttcccttccttgctcagaaaataccaccgtaatggattcaaatattatgggaacaagttgttagaagagaacacattatcttattctgccacctggactttgagttccgaggccctgggttggtaaactctaaagaagataagctgggctcctcatctatgttagctatgctcataaggacatctggggtcacattctttttgcagccatggatcagacttgggaaaaaaagataagaataaaccattgtaaaattcagctacaacttaacatcatggtggcagaaagagaaagagtcaaagtgaacccaattgccaaagcattactacgaaataaaagtcaacctctcctgatatctcctgccatttctttctgggaaactctgtccacatggcatggacttcctcagcagggggactgagtcctggaaatgcatggagctctccaggcactgacaggaactgaccaggctaaccagacctccaaggactcacccacaatcccgccatcgggccagtgcttttgttctctgctctgtctcacactgtcctctggagaggtttaggctctaaagccaaaaccctcaccctttccacaaacagagtttgtaatattttagtgtaatttcaccgagcatgttgggaaatgaaatagcagtccacacccagcggtctacttaaaatatcagcaagaaaggcaaaaattcactcccagggtggcaaaaagccattccaatcctcagagaatgagctcagacatctactgagaaccaaaaagcatcatctgcagagggtagactgtttaatcaaaatgggcacactggtttcaagagtatgaaggtctaacctcacatgtgctttggtcgggagaagcaaaaaagcagaagaaggaactgggggccacatttagatccagattactggacagaaaagtatagtcataaaaactcagaatcagacggtgggttggcagcaaatgacttttttcccattaagtagtttgtgggtggaggcagatctccaaatacttcgtggcagtgccactgagtaaagcatggctcgtgcctcgattggttaataccaacactgacacatgctccatcctcctgtggaacaagaaatactttcactgatattatttttgggtagatgagctgagacctttcttcctttctctggtcaaattacttagcatgcatgatacattaaactaaaaactgtccacagaagtggcaatacttaagtagtgatgatctcatttatttgaggtttgacacaagccagcagagtgtttatgactcccaagcaggcatcaacaaaccccaaaggctgttatcaatactaagtatttgccttaactaggacattccaagagtggcttcccatagtggtcaagtggtaacctctgtggtcagctttacttggtgttacaagttatataagataaatactggaagacctggtttaaattccatctacctgggctgatggtctgtgccaaagaatacattgtcattagcatgttcagttgagaattacatcagattgcaatgagtgtaatgacctcaaacatttacaggtaagaccagggacttactatggtgtgccactaatgtaaagagactgtacaacagtgtccttcaaaccttaaagtgcatgcagatcacccagggatcttgcttaactgcaaactctgatgcagtaggtctgagattctggatttctaagaagcttccagggaatgcccctgtaattgggatgtagttggtccatggcacccactctgagtagcaaagctgtaaaaaacaccaaatgtagaattcaaataatttttctcccttcaaggcagtcctaggaatgtaaattccaaaattgtagccattgctcaagatgttatttaatatctctcttagatacaattttgcaatgtgttctaaaatcagttcaggtattttctagttactcgttccttttggctcctgataataatgctccattggatcgttcaactcatctgccagccttggtgccaaaaaaggcatgaattcaaaagatgggctcctgcgtccacgggcaagtaaacatttttcaaagttgtgtggagcaatgggaactgttctaaaaggacctgcaatcgtttggaaactaaagtcaaatctgctagttaaatactagtcttgatcattagctcttccatgcaaaaacaatcaaacaataataatagtaataatataactagtacttaaatgcattttggttttgttttgttttgtttttgagacacgatctcactctgttaaggtgcatttagccattggctataagcatgctataacagtttgtttgtttttttttcccacatcacctctgggcagcatccgggaactctgtgggactacatcgatgcaatgtcaatgaaataataataatctttatatcatatggtgatattattcacatttgtatttgctatataagatttactatgtgacaggcacatttctcagggctgttttacatgcatccacttatctgagcctcacagcaactctacaatcaagtcacccttcttacctccatgtgcaggctgagacacctgaggcatagagcaatacagtagggtgggtggttccagcaagctggtgaaaaatcaagagcccaggctctatcactcctgcatcttggtggctgctgtcattaggagttggtttgcttgacccagatagataagtgaaagccaaaacccactatgacttctgtggagcttggactccccaacacccatttcccacctttgcagctgcctgtgcatggtgatcatgccacagcagggaggttcggcctggccttggcatgctgaagtccaggaggaagcactgagttaagctcacaagtaagaatcaaggacatttgggtcaccatttgaaaaacccttgttataagggtttttcaacatcacgaaacatttttattttgtgcacgaaggaagaattgcttcatacagtggtaaaaaaaaaaattctatgaaacctctgcattggaaatggctaaaaaatattaggaccagttgtagatcaagatgttttatcaggttcccttgttaagtggtctgttctggagctcctaagacatgccaggagatctggcagtaagttaagaatgacttcaaagacagtcctgctaaaatagatactaagcatggcaccctgggtctggcttcaggtagtaattgatgtttgggaggtacacattttattttatgaaaggaacagataagtttaacatcatcagatatttctctctctcgctcgctctctctctctctctccccccctccctccctctctctggaagcaaagagtatgtttgctgtgtgtgaatcaatttaaactggtgtgtgatggaaatatttcatggtgagttgcccgtgtaactgaaaaaaattataataatagcaaacacttaaatggtttatgctgtttataagtattagctattttaatcaacaaattgatcctatgagacaggtactgttatcattcctatttttctaatgcagaaactctatagagaagttctgtgactcaactgaagggccagatggggagtaagccatggggatagaatttaagttggggcagtctgtcctcagtgccattgctcctgccctccaggaacactgcctctccatcaaagttcctctcctgatcttacctccagggacctctgcacaggctcttccccttttcctgcagtgtcaaaatcctgcccctagtcctcaaggaatgactcctctggagtccctcaggtttagagttgccagataaaatgcaggatcaaacattgcatagaagagcttgggcacggtggctcacgcttgtaatcccaacactttaggaggctgaggcaggaggattgcttgaagccaggagttcaagaccaggccaagaccagggcaacacagtgagatcccatctctgaaaacaaaattagttgggcatagtggcacatgcctgtagtcccaactactcaggaggctgagacgagaggatcactggaggctgaggctgcagtgagctatgatcatgccattgcactccagcctgggtggcagagtgagaccatctctaaatatgtatttatacacacacacaaactatacacacatacatgtgcacacacacgtataaacatacatacatattatatattgcatagaacatacttatactaaaattctgtttgttgtttctctgaaattcaaatttaactggttgtcctatatttgtatttgctattaggttggtgcaaaagtaattgcagtttttgccatgactttcaatggcaaaaactgcaattacttttgcaccaacttaatatatttcacattcctacttagagattagcttcaataccttctcctcaaaggcctttccacagactcaagagcacaccccctccccacattgccattgtctcctcactgtaaatctctgcatggtactcaagcacatctgacgcctgctatgagaatgtcacccagtgaagcagaagacagacatgcttgtccatctggtctaccactctatagattggataaagataatgtggcacatatacaccatggaatactatgcagccataaaaaagggatgtcctttgcagggacatggatgaagctggaaaccatgattctcagcaaactaacccaagaacagaaaaccaaacaccgcaggttctcactcataagtgggagttgaacaatgagaacacatggacacagggaggggagcatcacataccagggcctgtcagcgggtggggggttaggggagggatagcattaggagaaatacctaatgtagatgacgggttgatgtacagcaaacccaccatggcacgtgtatacctatgtaacaaacctgcacgttctgcacatgtaccctggaacttaaagtataatttaaaaagaaaaaaaaaaaagcctaaacgagtctctgatgaataacaggtatgtgataacagtatgtggaaagaataaatgaatgtgtgtcacctgctgcaagacttctggaggatgtttccttacctccagagaacacagaaaagttcaccagaagatgtgctatacgtccttgtcttttccatgttttgtgtgagtaacttggaactaaacacacgttcctaatttcctacttcaaaggcaatgaatttcccagtgcctgatgattatttatattttaaatattttgaaagaaatgtcagtttccttgcaacaaattaagtgtatgttcttgaaaatggagagcacgatcccctcagcatgcatatggtaaatgccctcaaacacgcaaacagagtccacgtctttgaaaaacactttcaacacaataacagccaggaagaagtggtctatttttatacagcagcccccacatgacacagcaaatcaaacacattatttcactaattcttttttacctgttgcttcaggtgaataaagtcacaatgtgtgtagaacaagtgagtgaccctttacaaagactcttgttccccctagagatttcattgtggcaaggaaatagctctagagtagatcatttttaacctagtgaacagccacaatgaaggtttgataaaagatgaaccaaatgaagtaagaacaggaagcttgagactctctgctctgctcaatccataccatttccagaacgggtcaagcactcagaagtgccctgtggctgtctggcactagaaactcatggaaggtaaattttttatgttttatttttcattaaaacagactaagaaattgcctaaaggcaagttccatatgtttggctgttgtttaaaccttagtttcttaaatacatttgaataaaactatgacagaagaatcattggtcgctaatttttaaaagagtaaatattaggtaaagataaaatgaattactgactttatttcatagttataatatcttaagttggaaagactcttttactttaatcattgtggggaagaagtataagaaaaattttaagactattggggtgcaaaccacagggtgtagcctatatctactccacatgcacccttctgaagttcttatatcctaacctcatttttcatccaaccttaaatgataccacaaaaatgcacttaccgaccaagccttttttttttttttttttttttgagacggagtctcgctctgtcgcccaggccggactgcggactgcagtggcgcaatctcggctcactgcaagctccgcttcccgggttcacgccattctcctgcctcagcctccccagtagctgggactacaggcgcccgccaccgcgcccggctaatttttttttgtatttttagtagagacggggtttcaccttgttagccaggaaggtctcgatctcctgacctcatgatccacccgcctcggcctcccaaagtgctgggattacaggcgtgagccaccgcgcccggccccaagccttttttttttaatgtcagaacttttctccaagtgaaaaacaccaataatacacaccctccattttcccacaaatccctcttctttccccatatcttatcaacctttcaacgaattggtcaacactctccattaacaaacttttaaagtaagaaaaatggatgatgactgcttaaaatgagaatcctactgtaaaaatcattgattctttatctggaaattccaaaatgtcacccaatgtaaaatgaactggcttaaggagaattttatactaaactttctcataaaatgttattttttaaaaatagggaggagtgaaaatgaacttactgggaggtacagcaaactagcaaactacttattttgtatttgggggaatgtgtggaaccatttagaggtacagaaaccctctctgaaagaaagaatgatttgacaatgttatctgaaacttcccaatgccaatcttttcaaagtctagctgttttattagttactgagagagggatatcaaaatctccacctatggttgtgaatttatctattttttcctttaattttgtcagcttttgctgacaagtcatagctcaaatttgggaaacactgtttcgggagaccacagaggagatacaaccgtggaaccaaatgaaccatgatgtagctctctgaactgatgttcacagaagtcactgccctacacatttggcaattctattttaagatatgaccatgttttggtctatatgcaaacctttccctgaagtgccattcaccttttcctgaattgtcatttttctcaaactgttgactaaggatgaacatctgttaagaagtgccacctcctgtctgagaaacatggagcatgtaaagccactgtagggaagatgacatgcaatcactataacgcacgggctttcctttaagtcagctttgccatgtaatctcttcagcatgcattagctgtgtagccattgggatgtttcttaactgctatgaactcaattacatcatctgtaaaatgtctttgaaataactatctcattaggttgaaggccatgaggatttaatgagataaagtatatataaactgctgttcatatagtaggtgctcaataaatgctagcttcccttctgcatttccgtttatatgctagcaaggtcaagagcagatgcataaacaagaccgaattttctagtccgtatttataagatcttaactcatgttcagtaattaacactaatatacacaaatgaatatagaacaaaatgacttatacacactttcaggtatctcacacacaaatgctttaaatgccgttgaaaagttttgggaccttttcagtcactttgaatattcggttcatcgatcttcctttgcccccaggcaccatttgggggtctcaccatatccttctctctgtgactcctctggttggtgccatggctggcaaagtcctaagggatgccaagagaattcccctccatcagagcatctggagaagcacaccacctacagagctcctgggacaggtccaggaggttaaatgtctgtttagaaccattatccattctctattacacacacaggggacagtccacgaccattcattgcatcaagatcaaaacataatgtgttgcaggtagggaagatacacatcacttggcaattgcattgcatttgctattcaggttctcaaagccttgaaagacagcaaatgtctacaattccccagtgcgagatgatgggagatataaactaaatggcagagatcaaaatctcttctttggcattccgcaacacttgagacagcttagtgccaagagcaccagatttagagtctaaagacctggatgtgaacctgaattttagtttagatactggtatgtttccgaacctcaaatacaagacctgtaagatggggataataaagacttcctcctggtgttactgttcaagaatcagataaagcaaatatgtgagatattgggatcatctttgcttaccttgtaaaaggcagactctaaatcatttctaggaattatcaaggtctataccttcagtgctgtaactattctcacgttttgccagtagctttcctccagctggagtaaattgtaaaatccctcactggtatcatgatgctgtttaaggaggtggtttttcagatgagagcaccgaggccaatgtaaatgccacatgcatcaaattcatgtgtgctgattcaaagactaatagtcttttagctctgcaccttctttgtgacaaaataaatttgtcatcagtaatgaaacttaaaacttggctggcaaatccttaatgctctttgcctttaaaataaaatttgaaaaaccttcagttctatgtattgacatctttacctctgatatattaacaaaccattagcagtttaagggctgaaaggcccaagtagtgttatgcatgacgtctgggacatagctgaaattcaagggtctcacaccatgacctgcccattatttcaactgaaacctcactcccgcacctcgggcaccctaggcacaggggatattctcagaaaatggaacataaatggcattggaacatggagacaagaccttattaactagaattatcactcgactttggaaattactttaaaactgaatgccattctcatggatagtaaaatatgacacccaaggcggttctcaacactttgaaatcatttgagtttggattagacaaaactccataaaatatacacatttgcatgcacagagaaagatcaagattatgtgtacatgtacttagcttacgaattataagtggattttttgtgtatttttacattgtttatacccacatataggcatatatgaatatttacaacgaagccaaaatttttttaaacgtactccaaatcaagttaatactcattaagaaaggaagaacaaaatacagcaaattctccattatttgtgtcaataaggttaaggcacaggttcagattttgctttgaaatgcagaatgtgatgattttgcagcatgcttattcatattaaaattttcccctcaggacaggtggagaatagctaactccacagctatgagaagtagcctgggggtgaatcaaacaacaaaatatactaggtgcatggaattttacttggaagtcacaatattcccattttccaggtaagaaaactgagtcttaaaccacagtggtaataaagaaaaaattgttcatgacatgtgttaaagacaggaaggaagactttattcaatgggagactattgtaataggtataggggccactgcaatataatttttgaatgggagagacagattggaacgaattccaaatacagcaagaccaagtggaaatttacagccaaggaacagggtagggaccagtggatggaaaattaataagaggaaacatcagaggtaaggggaacgtacttacttaatacagcaaatcaaacacactatttcactaattcttttttacctgttgtttcaggtgaatgaagtcacaatttgtgtagaacaagtgagtgaccctttacaaaaattcttagcaggactcttgctgaagacaggccagggtgatcacccattatgggggatggtgaaggatgaggaatctgatcagacatagaaggtgatcgaatattgagggggaggggttctgggtcaactgacttagcaggattcttgccaacactggaccatgcatgagaatccaaacatcaagacctaatcagggagagactttagaaggagagaatcttggctgggtgcagtagctcatacctgtaatcccagcacttgtggaggccaaggtgggtggatcacggggtcaggagttagagaccagcctggccaagatggtgaagccccatctccactaaaaatacaaaaattagccaggtgcagtgtcgggtgcctgtaatcccagttactcgggaggctgaggcaggagaatcacttgaacctggggggcagaggttgcagtgagccgaggtcacaccactgcactctaacctgggcgacagagcaagactccatctcaaaaaaaaaaaaaaaaaaaaaaacaaggagagaatctttgtcatttgtcaaagcgtaccacaaaggctattcccattttccttttatctttagttaacaaacacttaagtcagtgtaactgtgcaccaggcactattgtaaagagctttatacatcttaactcaattatccctctggaccacccatggaggcagtaccattattagctttgttgtacaggtgaggaaacttaggccagagagcttagtaacttgccaaagattgcatagctggtaggtggaggagaagggatggagtgaatctaggttttgtggggcctgaaacttacacaatttgtggaactatgtaagaaaaataatacaaaataggaaatacaaaattagtcatgaatgagagaataaatcataacaaattactgatgccgtggagattcagggccttttgaatctagttggagtagggaagccagtgtgtggtcaggaaacattgctagtcaattgactattgacgagatatcaatatcaactattccatccaagagatatcaactattccataatttgctcccgggacattccatctgcatttctaactcatttgctttgtatattacgttctttgacttcaccagggccttccttgcccttccatttcccctaatcttactcaccctgctgtctgggatcaagtactgtaccatccgtgacgccactaaaagccagggccattcctccctctgtggtctcccagaacagtgtttcccaggctttgagctgtgactcataagcaaaggctgacaaaatttaaagaagaaatagataaatccacaaccataggtggagattttgatatccctctctaactgatagaacaactagactttgaaaagatgggaattgggaagtttcaaataacactgtcgaacaatttgacttgtccagctgtagtaactacaaaacttcagaatgcatgttctctcaaatgcacgtgaaacagccaccaagggaaccatatcgtgagccataaatcacatctcagtgaccttctgggaacagagtatattctctgacggcaataaaattaaattagaaaccaatagcattaagacatctagaaaatctccaaatatttggaaattaataacatactgcttaatgactcacgggccaaaaaggaagtcaaaaattagaaaatgtttggaggacctatcatcctttgttacagaaaactaaatgtatttcccatctcatgtatagatatggagggagaacatcagattttaagctttttctcatttatgccacatcctgtgatcaattaaccctcaagttactaagttagtaacttccagctaatgcacatctcttgtcattttcaaggactaagcagaaagaataaaaccttgtatttagaaaaacacaaaacttgcaaaatataaaaatagcaagaggagggtgagtcacttctcctggagtgcttctgaacgggtaacccatttgaacctagctgcactcgcagctgacaatcttaaatctgcatatgcaatttgccattggttcattttcttctgcagaagatgggaacctcattcacataatttttgtacagtcccccatacaatacctttcaccgttgggtaccatggagagattggcaggatgacctactggatgacagcagtgtctctcttggagttgtctgccaatgagctagctggactggaggctcttcttgcccagtaagaaagactaggcgtagtcccgacctctcaccttgcctctgctcaacagccaatgtctccaacccaggtttgcaactccccagagcaactggcacttaaacttgatctgcttttcttctgacattttagtgaccttttcaaagaactctctagaaaaatagagcaacagggagcagggtccctgaactggaacacaaccctgatgcatccaaccatttttggcttgaaaatatttctccccagtatctgagaagtgatgtccatggtagtctgcgtccttctgcctgaaagtgtgatactcactcgatacctccctagaccttttgctagacaggactgaatgcattaaagtgataacagctagaccattaactggctctcttggatggagcaacatactaactcaacacagaagatcacattggagccatctcggcacattcgctcagaaatactcattttaaaacatcttaaagtggaatttatgggatgaagtcaataacccatattattacaagtttataaataactttttcattggtagatagttaatatcttcacagagctataatttttccactgaatcccctgtatataagaacaccttgcttaaaaattaaaagttaataatctttttaaaaagaatatcttgtgtgtttattcaattgggtctacaatttctgcataaagaatgtgttctgtatatattatagatgtttctgcaaccaccacacatggccagacttatttttttattaataaatataacatgatgctttagaatgtttcattgtcctttttatttaaataagttatcagcgtgcctgctgtacccatcgtaaggactctgggtacattcatgagatatatgtggttagttcattttcatggtaagatctagttttccctccatgactaattctagtgttttagacaaatatcataagaaatgcctatctttggagcagacagattttgcagaactctgtatatctgcgctctggacctctacactgtagttacatcattctgaagaaattagtaatatccatcatatccttccaacacgagcaaaaaccaccaggtggggattgggcaacaagacagattagcattctaattgcatctaaagcaaaaagtaaaatttttaaataataacttttgacatccctggaaagcctgtagcagaccatctttaattttaaaaaaaattaaaaggttgtctctaacatttccctgatggtaacttataccaccagtttcttaagcaccttccatgggcctaaccccagctataattctggccctcactggagttccgggcacatgaaagcaaggacttgctcattttgtccactgctaaaccctcatggctggcccagtgcatgacacatggagacactcaagaagtctctgttggtggagtgtgtccactactgtagggggcttaaggctagaggctcattccagcaggcacatttcctggtctgccttcatggagataggagaaagagaacaatggagggagggagggagggagggagaggaagaacaagagaagaggaaagggaagagtaagatgaggaagaagaggaagaagaagaggaggaggagagagaggaaggagaagaggaagaggaaaagaaggtgaggaggggggaatagatgatgtcttgtgctttcattaccccaaagcatttgagtcaagcgttaagaagttatgcactcagacaataaattaaacttatcattttctacctgatattttaaacaccacatggttactaccttaagaaatatgagaaaatggaatcatattggttaacatgacttcccatgttttgttccatattcataggagtgtcattcctaaagtaagcttttagctagaacaaaaaagcaagaatcccactgctccatattctactgcttcctaccaagctccaaccaatggacgcataggcaggtcttcttttgtcatgtctcctgccagtcttcctaccttatccacagaaatcattttatatagatccatagagtgtcacacccaggagagtcaagtgtcatactcaggaccatcacttgtcacagaagcagcctgcccccttagcccacgggacgcagctaatgcccttctgagactattgagctatggtttcatggaaatttcaaggaaggttctcactaaggccatgatcttagcttggagcatggtctctagggctgaatgatcttctagtagtatgggttcaccatccctttccttccaccatgtgaatcttctctcgggcctccacttctctatgggcttcagtactatatgcagaaagccccaactctgtgtcactacaaggagccttgaccttgacctcctataggaaaggcactgagagttatcccaaggataaagacccatcattttaggaccaatacagagtctaaaagatcacaacatgaaaagagagatcagagcaaagattaacagagcagcacttctattgccaagggcaacaggttgcacctaaaaatatttctgttttaaaggagaaatagttcaaatgacttctttaaaacaaataagcctgatttactacactttacagattcctatttgtaagaaagaaagttctagacttagaagataaataaataagtgaatacataaataaaagtttctgaccccatggtccatgcccaggacacattcattgacgacacgcattcgtaaatactctctaagaactacacagctgtggttagtcatattgtttcttgattaagtaactgtagtttcattcagatccttttaaaaagtacatttttagcatatcttccattttaaaaatacattctctcattcttgccattcatgtactttgaaacgcttccctaaagatcgacatcaacagtgttgaaaaagaaaatatttgggaacaggaatgaaccctagtggaatgggttcctacaccaaagatcctatgaatccatgcttcattgtgcaaagtgaacccctactcttatggacctgctgctagagctctgataggtgttgaatgatcccagaacctgaaggacctatttgaattcagatcattggtcttatcatcctcagtagctatatctttgtcagtctacaagtactagccttgaagttttatgacactttattctcataaggatcattttttttccatagcagacagaccctacatacccctcaagtaaacccttttttgcactatagagtctacgtcaaggaatcctcactgtgtttacattctgattttcaaacatttcaatttgtaagtaagtgtatgtgttgccttcagggcagtgtaaatagcttgcccaaaaatctcagcataaattttcacctctcctttcaaggcctcaattctcttctctacctctgatgatgtattgacttgggtattaatcatctttaaacatttaattactgtctgagtgccacgtctcaccttcagtgctgttcctcacaaagctggatccagtacagtacagcatctttaaaccaatgcacaactaacagatttgttgctgcaaaatacttttatgcagcatcaataaaacctctccagcaagcacagagagccaatggtcagagtcccagggggccttccacacaggatacgcatcttgttacagaattcctcaatgcctttttgctgtctccctaatgaccagttaaatggtctccctcgaggatgcttgagtcagcgccagcttgaaaactgctgaggaaacatcctcttttactggaaatgatttccatccaacggccatgtgccatatttagactcacggcttagtaacacccaacagaaggggctaagtttgcagaagaggaggccctgtgctgtgagaaaagaacttgcttttgtctggccaagtgaccgcaggggctggagctggtgagtctgtggtggtctggaacccgagggacagaaacgctccattctatctggagagacaggcgtctcttctgcagggcagctggttcttcccatgctgcttgtcttacacatcagagacctgactggggaggtggtgattcaagtctagcccacgtctgcctggcaataagacattaaaacccaaggactctgtttgcctgcgttcaacaggcgggatggatggcaggcaaatctatcttcatctccctttaaaagtaaatcacacaagaatgatattaacatatcttgagtcacagagtaaaattctgctaaagagcagaaccactgaattatagagctttaaaatgtatctatacatattaacactaataatttaatataaacatttaagtgtggatatgagattttaagtgctctcttttctctctcagttttccttggcctctctattctccctgctccccaatatccacccacattaactcatacaatcaacttagcttgcacccttccatgttcctcctcaggttcatctagttttatgcagacacgtatacacatatccacacagatacatcctttatgtcattattttcttaaaaagtagaatcccctgtcaaacacttctctgcatcttgtttttctctcccaaaaagagaaaggaaaacacccccacatcaacccctatagctgtgactcagtctctctaatagttgtgtattccaggctatggaaatttcataatttttctatccattcctttatggataaggcaaaacttcttgcaactctgtcttgctctatttctataatttccaactggaaatcaaaacaaagaattcttacacaaatcttacatgtattttctttaacaaaaaccaagaaaagttctcccttaagccctaacacaagcccatcttattttcagtgcagagggcaatgctgttttaaaatgtgggttttatgattatccaaggactatgaggccaacagctcaggaaaggactacaattgcaaagatagctcatgactcacggttcccccgaggaggaggcagccatgtcatgcagggtcatatgcggaagcaccagcgttggtcaggaggctgagggagtgaggggaaggcatgaaaagaggctttatgagggattccaaggaaggaatgagtatagcaggataagcaagctaagcaggtttagggttagctagcttgaataacttctgcaggctcgagtgtttggcagctgtcctgggttgtccaacatctgcccttggtgtgattagggcaggtaaacagtggcccagaggtggctggcagggtatgggctttggactgattggcttgcatatgaaaggtgctcttctaagttagttgattgttatctttgggaattagctaacgctctcccctccaaggggcagtccctcctgacccgtgagaccgcaggtgccagggcttcaagaatacagaaaataagaaagaagttaatacaaatgcctagacactcaagcaatgtttgataaatgataggcaggctgatcaaggaaacacaatacactctgcctcctgcccaaaggcacagctccacagactcaaccaggttgttgcatagagccttagtctccgaggggtgcaaatgagctccttccaaggatgaggtggggaggagtactgttggggctgagtggctgatagctagcaggacagcatgaagcatgctgagctacagctgtggcagggaggatgatcatagttgctgtttgttctacaaagcttgcagtcctatctagagacacctacttggcctcaatttccttgctcttttggccaattgctgcacactcttgagcagcaagtggaatggcagaagccccctccctagagttggggagtcagctgctagttctttgaccatgtttacttctccattgaagaagctctctgtcgttctgcctccagcatccccacatcccctgctcatgggaggaaggatgaaatcagaattctccttgccatgcatgaagaaggatctcattagaccttgtactggggcttctttgctagttatgtccctgtccccacacacactggtacataatcactctgtgttgtatgcattcattccttgtcattttgtcatgcatttatgaagaggatatagggttagagatatgttattcctgaaaataaatatctgtaaaggggatcatgagtgcaacaagacaaaagaaatcaaggtgtttggatttttcctcttcctccccgtcagccttcctccctctattcttcctcttcactgtctggccctaatgcaggtgttgttgagtttgagttaactgagaaaaaaaaaactgagtttaaaactagccagtccaatttaattcattcaataagcatgcactgtgagtccattctatacaaggcttgcagatactacaatgagcagcatggtccctgccttcaaaacacttgttatttaatgataaaaaatgattatatattaagcattgtcaaaaactatgaagggtctgaaattataacctatttgcaagctaacaagttagtctgccacaatttcatggatgctggtagaagacaggagactcctgggtcagagacaaagaacttcattactcacagcacagcaggcggcatgaagtttgcatttactttggtttcccttacccctcaacccttgcagaggtgaggaggagaagcccaagtggaggttgcatacacagtgagtttgtgtcacaactgaggagctacaagcttagaacatccaaatcttcataaagggctgcaagcaaacctgccgaaccctttgccccagcaggatacactatctctatcatccaaggatgtgcacgaaacaaacattcttgaaaagatagtccagcaaaaaatgtagttactgttcttcttataagacatgcagaaccatgaggcaccttggggaattgtctccctaaaagcatttaccacctgtcaggaattgtcttaaattcaggatctcacttcatcatcacagccactccacttgacatcccacttcctatcctgcagtgtaagaaatggatgcatgcctcaacttcaggctcaacaatacataaataaaagtggccaaagaaattggattcaaatctgattccaagttgtgacctgcatcctcaagaagcttgtccatcttcttatgggaggacaatcaactgtccaaaagatgtatattttccaggtacataggtaggagttttgtcaaagacagggtgatatttaccactcacctcctgacacgacctacctacaacaaaacaaaactcactcaggagggtcctgactatgtactcagagattatacccatgcacaggtaacgatggaagtcatgagacaaatctcaaatagatttaataagctaaacctcacaggcaactcttttcctccatgaaggtatctatcctggtcaaggcatcaaaatgaccacagtgttactgtagtatgtatttatctgacagggtagaacaataccttgaaatttgcaaattgaagtattgtaaacataggcaattgctatgtttagctcgtgtttctccattccagaaataattatttacagccctcctagggccaagctgattctgcctgcccttgcattgtgggcattttccattcacagccagacctgccaaaagcagagtatctgaatgttttaactgtgggttttctttttttcaaaatccggtacatttttttggtatttaataaagcataatgaatagcattgactatgatacctttccaaacctagacattttaatttcatcattccatgtttaacctaggaaacagtggcttgtttaatgaatgtgccagttttatgctttgtgttaatgtgacctaagcgaaacacaattaaattttaaattaacatatccttataaaaataacttaaatctttatcttctctaactcttcctctgaagagaaaattatgcttctgcccaaaaagtagcaagtggagtatgtgcccaacttcagacttggcagggtgatgttgcccttggatatcaggaatatctggatgcaaggacacactgatagactccatccccatcactaccctccaccaaaaaagaaaaagaaaataaacacttcaggcttttttcagttatcgaaaatgtgtgaatggtgatccatgtctggtcttcatcctaacttcaattcccaccctcaaccccaggcaacccctccacctcaattccatagaacctcccttaaattcccccttcagccagtggacaacactgagtgttactatgggttgtattagtcagttctcatgctgctataaggacatactcaagactggataatttataaaggaaaagggtttaattggctcacagttcagcatgactggggaggcctcaggaaacttacaatcgtggcggaaggggaagcaaacacatccttcttcacatggcagcaggaaagagaagcgctgagcaaaaggggaaaagcccattataaagccaccagatctggtgagaattcactcactatcgcgagaacagcatgggggaaaatgacatccatgattcaattacctcctactgggttcctcccacaacacatccagagattacaatccaagatgagatttggatggggacacaaaaccaaaccatatcataggttaaattgtgtctcccaccccaaaaatgtgtatgttgaagtcctaaccttcagtactcagaatgtgacattatttggaaatagggtcattgcagatggagttagttaagatgaggtcattaggatgagtccctaatccaatatgactggtgctcttacaaaaaggggaagtttggacacagagccatgcacatgggtgggaagaatcccaaatgaacggataggcagagggttggagagatgcatcaacaaggaacaccaaagattgccagcaacccccagaagctgggggagaggcctggaacagattctccctcacagcctgagaggaaccaagctggctgacaccttgatctcaggttaccggccttgagaactgagagaccctgggtttctgttgtttaagcctctcagggtgcagcactttattatggaagcctgagctgactaatacaggtgtctctatatctcactgagggaaagtgacaggaaagtaagaaccatttatgtccaagagtccagaggagtcaaccagattctgggggaaaagaaggtacaatgctggcctctccatgcagcctagtccccaacacttgtagggcccagggcaagatctaaagcactctctcacctatgcatctatatgctgtaactcagataaacaaactattaaataatatatgtgtcttgcctctcaatctgacaattacacctttataatagcaacataggaaaataactaaaactatggtttttaggcaaccaaataccagcaaaatgtaataattcctattattagatatgtttaagtgttctgctggtgggtcagcatctttggtagagtcataaaattaaaatgtacataattaattaaatattatatgtttattccctaacatttatttctgtcatttcttttttctttttttcagacagtctcactcttttgcccaggccggagtgcagtggcgtgatctcagctcactgcaacctccgcctcccaggttcaagcgattctccagcctcagcctcccaagtcgctgggattacagatgcctgccaccacgcccggctaatttctgtgtttttagtagagacggggtttcaccatgttggccaggctggtcttgaactcctgacctcaggtgatccacctgcctcggccactcaaagtgctgggattacaggcgtgatccaccgcacctggcctatttatttcatttcacatgtctttataatcaaagctgtcacataaagtgcattgcattgactgtaataccacctgagacaagacagtttttttactaattttaatttcaaagaaacactttgttcaggcagtagtgagcagaattatcaataacagatttaaagtagtacttaaatttggaaacaacacattaattttacatatcatcttcaaattgaaaatattacaaaatattttaacttcatcctatagattgctattacttatatttctgttttcaccatttcttaaagcaacatctaagtaatacataaatctctagggatatgtgaaaaatcattttcatgctttatatatgttacatcaaacccacctatacacaaattcaagaataatagcaattgtgtaatgttacaaaatatttctcaggtaacatgagctcacctattgagaacaccaagctaattcactggttcatgagcaccctcccaaaccacaaattggaacacaaagagaagcaagaagatggatgtttggaactattggaaaatgataattcatactgcaagaatatactgccaccatatctgcaagacaggacaagttcattaatttattctttctcttacttctcctaagctgtatccatctccaagaacaaaagtagctaatactattgacggatcaactataatatacttgggacatacttatactaaaaatattattcatcgttgatctgaaatttcaatttaattgggtatcccttgtttttatttgtcaataatagacccacagtctttcatggcatttggactgttatcttttgctttgaggagcagaagacagaggtggagaagcattttcctgaatggtgttagtcgctacagtggatattttaacatctcaaggtgcctttgcctgtgcccaatgctgggtccccgaagtcagaagtgctcatctgttctttaaggcagggtcactttctgccaccacagggagcagtcattatgcatactcctgttgccagctgtcagtaaaccaatgccgttctcttttcttttattatttcattcatacacatccattgtgtacacaccatgagccaagcactttggaaggcacttctggtgagaaggaagaagtcaggacaccacagatatgagtgagaaggaggctaccgtcccggcacagtggcttacgcctataatcccagcactttgggaggccaaggcaggcaggtcacttgaggtcaggcttttgagaccagcctagccaacatggtgaaaccccgtctctatcaaaaaacaaatacaaaaattagccgggcatggtggcacgcacctgtagtcccagctacttgggaggctgaggcatgagaactgcttgaacccgggaggcaaaggttgcagtgagcctagattgtgccactgcactccagcttgggtgacagagcgaaacttcagctcaaaataaaaaggagcctaccacacaattgttgacagtctatcatagagagtaaggacatcagccaaaggtggtctgcagagatcagacaggggtcatctcaaaagggaacagccttaatttcaccttagatgtagacgggtttgacagaaaaacaggaaaacaaaagaccgtgaatgtcccattggaagacatactaggaaactgtcatggggcaaaattcatacgtcttagagataaaagttggtaaagcacaattgaagctatttcttattaaagcacaattgaagttatttcttgttttcttcagtaatagaaaagttggacatttttctttaaagaaatcaaatgcaattatcctgtacagactcagtaactctagccaaggatcaggttagtcgctttcatggagcgggagtttcggcagctctattgttctagcattagtaatgcgtgagacctacccctgaacacttccagttagggaagctctgcagagatcttgcactgtgccacggatggcctcgtgcttttggcaataaagctggaaatgcaaaacacgttttgtggttcaaataatctccaggagacagtttcctggaagttttaaatcctatttctcataccacctccatctaaattgatgatttctatgaccttttcatctaattacactagtatgttgtacctatttttattaaatggttccattacataagccattatgtgctagctccttcttgttgctaacctcatgagcccaccccattacttctcttcactttcacatcaaggatagcattcctcaagatgaaatttgttatgttatcttagatctatctaagattttcacaaatcacttcactaacacttaaatatcagagacagacacccagaattctaccaaaatcgttgtgtaccctcacatgaagtggtgtatagactggttgacaagacaaggaaaaaatggaaagcactaaaaagcaggaagaaaatacacaacactccagagaagacattaggaaaatttttaaatgggtaaaaactgggaaaaggatggagagtggctggagaatgccctctcgtgccaacagtcattaaaagacacagcagaagacgccatcatgggcagcacaaatcagcccccatcccgcttttgaatcatagagaagtttgcaatgtcaaacaatatccttctaatatgttatgagaattctatcagaccctagctaaaggtagaaatgaacagatatttatgagaacagcatcagggagagaacgtggagaactgcatcactacgtagttgtacaagtgaattgtctaatacaatgattagagtattcctttccgctagtttctaccccaccatatttattgtatctgagttctaaactatttttattttattccctcctgtccaatacttggcattcacctaagcagtcaggaacatctgctgtatttgtgacaactattcagaaggtataaaacaaagttatatgcagcatgtagcagtgacatttgattgcaagggagagaatccaactagaaatgttgactcactgtgttaccaagcatcgtgaaaagaggctgacgttagccggcggtaggccagtaataatatgcttacaccatattaattgcagataaaccaaattgcattgctaatttcatttgcatttgcattatcattgtgttttaattactagagttaggccaccaaagactaatatccaaatctgacagcaccaattccctggatacattttgtggttgctgaatgattattgttcaacagtttgctgcttttgacaaacgcaaagcaacataggcttcccagccctgaaagaatgaaggaatcaatgaaagaatatcaggcgtggactgatgcagagttccattctggctccaggcatacggtccttgctcaaagataaaacaggcatgtttcccaggaccttccctgttaatgtgtgctgtttgaaaagaggtcagggtcaactaggtatgggaaataccaggctaaacaaacatgggccttattgcagaccttcttagagcctttaatatgttattgtacattgtgactctcagagagggaatagagtttgcagtgttccctaacacttacttgaccatctagtcctttttctcactgcaaatcttctggatttcccaggaatgcgcttttgaaaaagctgaatttgcataatataactgtaaccagaaccatgggcattccataaaagtaaacataagttatatgctagaaacattctactgtacttaacagaaactcacagtcaccagtccacaatatccagataaccctcctgtctacattgtaagtctaatgttcccaggatttctgcaaattactggggactttcattctcctggacacttctggccaaaagccccaggttccagtgagctaggaatctatggaacatctcttcttccagtgcacactatctccttccaacccatgttaagccaagtatgcaatcctcctccattcccagacttccacgaaaaccgagcaactaaataaacaaatcctttcatgaggcttgctcaattctgcagagcatttggaggttatactgcagcaatgcaagcaacctgaaattgtgtatcagacacacttgtgctctcttctttcaacgctttattgaaatataatttatgtatcataaaattcacctgtctaaagtagacaactgagtggttgttagtatatttacaacgttgaaacactcctgttcttaacttcctctataatttctgactgattataggctccagttttcttcctctctttctctgtatctctgtaaccctcaaattcaatttctttttttttttaatttccataggtttttggggaacaggtggtgattggttacctgagtaagttctttagtggtgatttgtgagatttggtgcacccatcaccgagtatatatatgcctttgcaccctcaaaggcatgtatatacacacacgtgtgtatacacacatatacacgtatgtgtatatatataatgacaataaggcaaacaattgacactatttgagaagcaaggttaacaaagacacgcacatgcacacacacacatatatgcctttgagagtgcaaaggcataagaatgacacaatgaatggacttgggggaaagggtgagaggggagtgagggataacagactacacattgactatatacatatatctatatgactactactcaaattcaatttctttcttttgcaaccctttggctttcttgtctgcagccaaacccacgccctttgaatcccatctcaactccgaacatcttgcccgggtaactttctaaataaagacagggctcttcctgaaagacattcagatgtcagacattaaaattaaaaaaacaaacaagacaaaaacaaaaataagaataaggacttcctcgcactggcctctcccctatggaagcctctccatgacttcaaccaaatcacttctggcttctgcgttggcagtccaatgccctgcagggagtccctgattgctgctgcccttgctcatccttgatgcaggtggtcatttcacccctccctccctttgtgagtgtctttacatagtgctcctgaccagaatgcagcaatatagctgcttctcactgcctgccactgctcagtgcatcccttctacctagttatgcccttcagatcaagtttccataagaccacaacagaaagcctggttcagactccacagtgacatcattccggcctctattccaacatgcagggaagatgccatccatcattcaagcatgagtaaccaattccatagaggaggcaagttcagtgtttctgtttggttaaagccacggccatctcaacagccatggcccaaacatttttaaacaaagtagggaaggaggaaaagaaatcagaggagaaatagtaatgggattcaggatgctgcacaatgggctttggacaggccaggtcagatgtggggtggaggtaagaggagagcctcaaacctcttcaacagccacagaagctaaagaaagcacaggaagacctatccttcagccccctccctagggatttccactggtggtgagtaaacagctcaattacaagatgtaattatgagttcactgttcaggagacacctagaattctttccagaaaggcaactccgccaagattttacccccatgttattaccaccatcatactaagctatccacatttgcatttgacccacaggctccctgtattctgtgtgtgttcaattcctgcatgttctgcagaggccatctaaaactaggttttattcacttcccaccttgcagcatttggtttaaggaacttcagctttcttgtagtttcatcacaaatcttcgtggtttagatcctaggaaaatctcccttcagcactaagatcaaataggtagaagctgtcgacatgcagtaaagcggcattgagaggaagccaaggtggtgtgaaggagttcctggtaagtccacagtgtatgtacatcatagccttacttctcagaaaatgacaataaggcaaataattgacactatttgagaagcaaagttaaccaagacacgggagttggaaaggcgcctgcacggatactgctggccccccacaataattccatatttgacgggcacacggcagtccagaaaacaagcacattttcttctttgcagctgggtggctgatttgcaaatgggcctttatatctccaaataatgaaataaacatgtgtttggattttaaggtgatgccatactgttataaaacattctaagtgcttgactctcaatttctgagcttatcttggagcagatggtcccatagaatgtgaagggaagaaatgtataaaacttacaagtcatgccccaaaaggggagcccatgttcttctcccttgctccatgttctcccttgctccttcacactccccttcttgttgactagaaagcagcttggccatgagccactgtggaccacgcaagtgtgaccaacatgctaggatgatggacaaacaagacagaaggatcttgggctccactgacttcactgagcaaatctgccataccagcttgaccttttgcacttctatctggtttgggagactgttacactggtcacaagggcaaacctatattcttagcaatatgtgaactctggatcaaactatttcagggggtatctgtacagacatggatgtctgagcatacacaccagcactaaaagtatatcaaagtccaaactgactctatgtctcaacatttgggcaacacacttttgaaatcctgattggtttggtaccttagtaaaaacagagtgagaaattgactgtctttctctcaatgtggggacaggccaatgtctgccctgagctctgccagccatttcacaaagatacacctcagtcataaaaacatatgtgattatatgtatcctagaaaacaatgttcagtaataaagtggcataaaggagcatatgttttttagggatttagaaggaatttcataataatgcttatataaaatagtgaagcaaatttagagaaaacagcacctttgcaaatgtttccaccactggcacactgaccattgacaagattcaaaaatgtgttagattcagactggacaaacattgaagttaatttaaaagcattttttgtttttggtatttcaaaacagtgagctgttttaaaaaaagtctttaaaaaagaaccctattacatcgacaatttaataagctcattcgtttacaactggttttttttttaatccccaatgtgttttttttaagtgatatctcatttattttaagcctggaagagagttttctctgcatttgagcagtccaggatggagctactaaaagaaaggtctgtgaacagtgagatccaggaactatttgtaaccagtctgcatcaatataagcacagacactggaagttcagtgcttagaaagttttacagcaatataatatcaccatgacatccaaatgcatgactgactttctaatcattagttttcatcgtattttaccaaagcatcagttctcaacagatttgaattttttttaaatggcccttcaccaagatagcaatggtctagtaaccaacttgcagatataaagacccatttacaaatttgcctgcagctttctatgcctccaatcacacacaattgacatcaaaacttcttacatacacaagcacattgcacgagctagtgcccacaacaaaaacaaagcgagaacttattcacatcttattgccacctgaccatacagcaagactgtttcaacagacacatttgcaaatcatagttttataataacataagaattgggcagtaattatttttataagagaaaacaacttgtatttgtgtgtgtgcatgagtatgagtatgtgtctccatcatacaaacaataattgcccccatgtcttctccattttgtcttcaattctggttcttaggattttctccaggtgttagtagttacacctctggaaagggtcttttgttaataccaaaagcattttgacttatttctttgggaaaaaaaaaaaaaacaacagaaatgaaagcaagccctcttttaaactggaaagctttattttgcccctggagaaaagcagcctggttaaatgtctgaacttattgttattattattttattgagcaataaactaaagtgtgattgagccaccagtgactcggatatattgttaagcttggaatcacatggttgaatgactagctggcccagaacgtgggcgattcaaatgattcagaagacaaatgaggcaggagcaagaatgtctcacaccaatacaaacccaattaacgtcaacaaaatcctgcaaaatttattgttgcttggcctctgaaaatggtggaaccaactcttttcctgtgcctgcagggcaaattcattagatggaaaacggcattttgttaaccatgaagttcagtaacataaacaagtcagtgccatggtccttgagacacctgcagagggtcaaccgcaaagaagggaaggaagagagagatgctgatcttgctctacaatgcccatgagtagtgacacagtaggtgtttcataaataatgtctttttaaagtcacagtccaggataaaaatgatatatctgattgtcattcagttcgttaaataacgatcatatataaaaagagaaagagagagaagagagaggaagggaggaaaaagagattgatattttgcctgcaagttcaccaaaggctaccatgttggtttgtgcttgtttttttgtttcagtttcttaagtaagagtgattcacttgtgctgattcaacttgaaccatgtttacatcagatgctcttatgcccacaattgacaaatctaagagtggtcatgaaacaaaacggacctcactggccccaaagtcatcgaatctacaattttgacctttaggctatgtgcccacagaactggacgacactgctgaattcatgtaaccctaagcgctgtgaaacgctccatcactgtgctatttgacagcaaggatggcgccacttctgagataactcatgccgcagagctcaacaacataccccttgttcaaagtagagatgatgggcgttgaaagggccatgacacagaggtcttttgtgtgatcagacttactctgtgtggggtaataggagtgtcgtctgaagagtggtttggctggataagaccacgaaaaaaaaaaagtaccaaacaatcaaaaagcttaatcatggattatcaagaagaccattttcccacccacatttgattctgaattcaatcaaacccttaatgactcatatgaggatttcagggtgttctatcaaaaatctgctgaaatagacccaaaacacagcaaaatattaaggtgaaatattatcagtaccagaaaaagtatctccaatactttttctcagttttcagtttcttatgattatgatgatgattcatttctgctgattcaacttgaaccatattcatatcagatgctcttatgcacacagttaacaaatctaagagtgatcatgaaacaaaacggaattcagaaagcaggaaagtatctccagtactttttctcttataaagaacataccatttgttgggtaagctactgatgctagatgcagcccactatggaagcaggaaaagaatctacttagtcactgaatcaacacttaccatgtgcctggcatggtgcaaggctcatgcagcagaatttatttcttcatgcttttattttgtttccatctttaatagtgatcagagctatgaagaagatcttggagggtaatgaaacagaatcacagaagggaattttgtttcattcagaactgggaacagcctatttgagggagggcagtcacgtgagatttaaaagatagtgtttgagctcctgtgactcccagtgtcttttaactttgtatttttactgagacccacaaaagaaattcataggtgactgctggtcctggatttttagggacaaccaagattgacatgtgattaattttctgaagacaactagattctggccatgacaaggggcttctgggatgaaaagctaggaccacagagggccagggggggaagtgggaatgagaccaaaaacaccaatagaaccaagaatcagtgaggacagagcaagggagaaaggagggtcagagagcaggcaacatggcctccaagaagttcaggtgcagaatgaaggacatcgggggaatatctgtccattaacctgcctggagccctcttcgtattctcctagacacccgaaactattctgcagcgtttttctttgctgatttagacgttacaaaaaatgtagtttcactgctgatttttctccagaccatttgtgcattcttgctctgaacaccccaatccataatcattgtcagctgagaccaaactagctgctaaactacttaccaatgtattcagtctccacggcatcgatcccagcagaaatgcaaatcagcttttccagggcgaacctccctcctgaagaagtgagtctaggccagcaactgccgcctggaggaatcctgaagtgccccccagatgtgtagggtcttggttgtcacacagtgcatttgacacatcacagtcaggggtccgtaatctgctgcctccagcagtaagataatgatgttgtagtttctcttctcttcctcttgcccactagaatttacttggatcctagcgaataaagatgggagaagggatatcagtcctgcccatcacctgctagcatctaccaccattttgggatagctgggctctacagctgtgtagacgacaaggtgcataccagtgccacataagccatgtttcaggaccaaccaatggtcagggcacacagtgtaaagtgagagagaggaaccaaggctggagggctcagggcacatgccccaaaactacagacactaaagggattggagccctgttaaataaagtgaaccctcttttccacaatttatttctctatcagccttggcaattgtccccacgacaagaaggagcctagctggggccactctgcaaattcatgaggcaggggagacatccaagctgggcatatgcatgattattacaggaagaggaaaacatctgagctatttagcatctcacagttcaaatggggcgattgctgagacactggtgtggaagagacaaatggggtggggaaatttttctaatcttaataaaatctttttgctttttccagtaagtaaaggagtgagtgatgacgtgtctgacccttctttaatatcatcaactggagcgagaaagacctgaaagaaaatatttagaaaaagagtgttcatattatgccttgcctgtgctatgccttaataaattctctcattagcaataagccaattctatataaacaatgttttctcagcaggcaacagcaagttcataagtactcttaacactcattaaagctcacatgcttcaagaacatgcttagaaatattgtgggtttcctggctctcggcacatatttcaatggggaataaatgggtgcatggaatacagtgaagagcaagttccttcaacaagttctgtcttttcttgccactgctcagtaacaaaggaagcagtgagcaaaacaattatttgggctttaaatggaaacaggaaaagaccagacatctaaaattggagaaaatgtacatgtcagaggctaattcagaattttttaaatgactttttttgttattctgggaagatgttttaagtttttattgtaaacaaatgtcacttttgaggcagatggaaaagtaatctaaatttagaaaatgtgtcattattaattgaccttagttatcagagaaagtttttttcaaagatctgctaacttcaactccaaactggacacaactgcctcctgtaacttacttcctttaacgcctcaatcaactacagtaactcgcatttgagattgattttatttgcctttaaccaaaacttgttagaaacagcctgcacaattatttctctttcctcatcctatttctttttggtacttctgtggggaaatgtgaccagtgtttgcaaaacaacacaagaaacacctctcaattgttttctggcattattaacttgttattgttaccagcaactctgcatctccacaactatcaatagtttattgcttgtttctttacttagattcattgacattaatagggtgaaatgtaatgacttacggtcagcattttggaataataaaaatgattaatttggaagttctttgcaatattctatacagttcaaaagccaacatctaaaaatgtatactgcatggagagaaataacaatttagtttcaattataaattaaatacatgtaaactccttaaatcattcttataattggcaactataaatcagttaccaggatctttcaagaatatttaaagccatatagtatagaaatgttttctattgattaaaaatagatgtagatagagattccatactagatgcttactcacatctgcatttacctactttttctttctcttatgaagcaaaactgtttttacaaaataggattgttactcccaggctcccctaatgactcattatgatcaaaatgacaaacttagtagctttaactttaattggtttggtacaatcaatgctttaagttggtaagtagattcacttctccatatatttcacatgttaaaaggttacttttatttttaataaaaataaaataattgtcagttttaataaaattacttcctttttccttttcaacttctgctttccttctttcatttgatgttatgtacacttccagtgttgccaacactttacagtttcaacgccttactgtgaacatgcttatttttaatttgaagcaaattgaaacacattttaagagttgaaagttcacatcctcctttcaaaaaaactcagtgcacttcagtgtgtcacaaactcagagctgattaccactgagttagaggtcaaattatttgtatccaaattaggatttctcatctttctttctaaaaattgtctgtattctcaagtttttaataggaaaaaaaatcttatttttatgattctgtttctgacaataatttttgagacaaagggatactttggctcaaaaattattttaagaataagaaaatcaagctctagtacacataattcctcatgtggcaaacaagaaaaatataatactgaattaaccaacaattaactcattaacaatcttcctttgttcagtgtctgctatgttgttattagaaatccagaaaagcaagtctattgaatagaatttttaagaaaaaaagttaagttttatattctactctgagatgttctggctgtactgtcacctgtcctaactgaaacaagggtatttaacatcacttttaatataaatacatttcattgacatttaagttattatcaagccgctgaagggcctaagagttgatattcctttacttcaaaagagaacattcccagtgacgatgtacccagcaaccacattcatgtggttttgatttttactcctccttgtctttataatttttactttgatttctttcatatggacacagaatgacttagcagtgtgactttttttctaattcattcaatcggccattctaaatctctcgttaagcatctgatatatagtcatgtagtttatttaagtaactaggcagtagcgcaggacacagactgaaattaatcccagctgcgtcgctacttagctgagtgaccttgactttgaccttgcttaacctcaattacctcacctgaaaatggggacaataatgatgattatataggattattcagaaggtgacatgagataaacataattaaagcacattgccctgtgcctagcgtattgtaaactctcaagaaatagtagccactatgaaagataaaagtgagttactaaaaagctataaaattatatgaatttaattgtagaacttacaagaaagtcattcattatgtaaaagaaatcttagaatggaaaaaggagcctcaaatattaacatgagttaagacaatagggactgtttcaatatggccagagtaatactgacatggagccagtatactgatatttatgacattaagcccttcttgtcccaccagaattctgggcagctctctgggattgaaataccttctgggacttactaaatgagctaataggccccacagtcaagttacctttgaatccttagttgtgaaaaacttggtgttggagctcccagactgtatagtttagttattgcctcccctattttgctgtagtatttttttctgagttatttgtgctttgttacttcccaatcacatacaactatgtttattgtactcctcccaatggatatgccatgatacagtatttctttactaacaagctttacatcttaaacacttttaaggtacgaattaccaagggaaagaagtactttccactcatttgccttttaccatttaagttttattcttagctatatatcaagtaagagcatttggtacatcccaagccccagaacgggtaatgagttcttttatttatttaaaatatttgctgcatttgtttcaatatcaaataaatcattagtaatttctttagtgttcagtacatatttaaaccaagaagaaaaagaaaaacaagtatgatcatattgtgaggtttacatgataaacagtaaactgaactcttgatttaccgtagaggagtgttatacagaaagcatgatcatccatctccatgcgtaagttttttgaccgttcataagatttgccaagctttcctcacatgattaaggtaagagtcaaattctaatgtaagaaatcatttgttttcacctcaacaattttatcttgacttttatttatggccatgtgaatgtcttccagtccctacatctctcctcaatcagattaaaaaagaaacagagagaaaaagaaaaaaaaaaatccctttcattgcatccccacaaagtaactcatgaagttcatcatctgtgaaggacagaaaaggcaaattaacagtcagaatgaaaagggaacaggcagcatcttgacgtctcacagaagtagttttggatgtgcttcctttcgtggttcccaggcccaagtgaaggttcccaagcaccttcttaagcaagtttcatgttggcaaagtttgttacgagtcatgtttattatgtcagtcgatgtttttaagcctaaacgaaattaatagcatcatgcatggcttacaataaaccctaatgaaacgttcagaactgtttaaaaagctgtagcaggtttttaaggaaattggttgcctgtatttattctttgaattaagtgttaaaggaaaacagaataataatatataaaacccgggtttcctgtaacaacaataattatgataactaacatctgtatatggctttacagtttgcaaagtgctttctcatacattacctcatttagcagagtggaaatgtttaatgatcccagttccaaactgcctttcattaatagtatatatattatattaataagcacatttagaagaaactatcttcataagcactctgctaagtgtgaacaaaggctgataaggagatgctgaaatccgatatcaaccccataaatcaaataaacatcgaataaaatctgtcaaacacttcataacattgtgtgcgtgtcatcaaactcaaggcaaatcctgctgtgtcacctcgaaatgatgaagagaactaaggtgtgagagcatgctgttagaagtttcattaaagccttatttactagttcagaatgaatttacattgatcttttaaactattgctaaccacaagtgcattaaacctaaacagtcttcatttactgagaaataaatgtgtcagcagaaccatgacttttgtccaatgttgttccggcatttaaggcatttaattcacaaaggctcagtgttaagctttttattgcttgttgtgctaaagcatgttcgtttaattgcaaatatatttccttcctgcatcattatcaaaattgttatcttaaggaaatattgtttttaaataatctgctggaaaaccagtgtggtacgtgggcttattcagaataattgtttcctgctacagatgggttagcaattaagcggtaacattgcttaaacaattttaaaaggaggtgaggataaaaggagtcggattgtgctgatctgagttgtaagaagctctggcatttttgtggagtcaacatgcactcgtggctgatttaatcaatacctcactgtttacatttttaaagaactttgttactggttccagggcctgatctaataaataagcaattgcaatgtattgtataattttgtgagatgtgaattatgtcaaaagtcaccttagtctttctgtctttgaaatggagacaaatgtcttgaatttgactttgaccttgaccttttcctatattaacttaggaaaaagacttgaattcaggcttcagatttttaaaatcccagtaacactattatgaggacacccatgctaaagacagaaaattagggacattattttaaataagaaaagaaacagcaatacctgacttcagatactccagggattacatgcatttcttaaaattgtttttcggtagctaaatacaacagacatgaggtttccatttcagtgggtgaaaaactattgacagtactcccactaaacccacactaaataagctgcttcatgttgtccattacatgggactttaaaaaatgctcactaaaagataaatcctttgcctaattgtatttaaattcaagaaaagagcaactctttactgaggagatgagcataaaggcacttttacgagtattcattattcctggagctacttacattgataactagaaagcaaaccacaacaagccaagcttccaatgggaagcaaccaaggtaacccacatttcaatatcactgtccagctaaaaaaaaatcccagaaactgactagatattgttctatgtcaaaagaagtgaggactccttcttgtctctattatgacatggaattgtgtctcagtttatttcaggggagaaataatttaaaaatgaatagcagtgtgagactcaaaatgggtgggcccctgcaggagaccagtgagcaattagccacatcctgcatggccagactgagtgacatggacaacacaaggggacaagtgagagacagagacaggtaaccactccctgccttcatccaccagtctgtgctctcagggaaatgccctctctgccatggggatcggggtgctggcaaggggaagcatggcattccgaaggtacagatgggacccaccccaaacttcaatgatgcatcttaaacctggactgccgtgcagccaggagggcatccgacttgtctagggcattttctcttctttccctgcagagttaatggggccaggggggtccagcaatgggatggaaatggatagcagccattaaataggtacaagaaagggatgtccgtgttgggaagtcggctgcctctctgaatcctttctctcaaagaatgacggtgttaccttgacacgatatggacatcctcccaaggctttgcacgcatgaatcttttaacatgttcttctctcgccgcaaccttttcccgttgtcaccctcctcctctcacaggtccctcatcgttataagtattgcaattctggagcacttgtgtgcccttccagcggcttcggggctcctctctcttcccttaccttcacacacctcccaccactttctttttgagcaaacactacctgtggttttctagcagtttccaccatccatttaggtactccaaagtgttgggttattgttttaaatgccttcttgaaatcaagaccaaattcctttctgaggtcaaagctcagctttattcttggccacagtgacctaatactcagcaatcttctgccctccataaaagcaaatggcatgcactaaattgtgctgcatggtagtaacccttcgctgctccagaactgcagaaatgctcagctgggtttaccttcttttggtctgttcttaccttagcttttataagacaccaagtacagtcacccctcagtatccatatgggattggttccaggaccctgaggattatctgcaaatgctcaaatcccttatacaaaatggcacagtatttgcatataacctacacacatcttctatgcagtcaagtgttacttaacaactgggatgcttctgagggatttatcgttagttggttttgtcaatggatgaacatcacactgtacttacacaaacctagatggtatagcctaccacacaactaagttggatggtacagcctattgctcctaagctacaaacctgtacagcatgctactgtactgaatgctgtaggcaactgtaggaaaatgcttaagtatttgggcatctaagcatacctaaacatagataaagtacagaaaaaataagataacataatcttaagggaccacctttatacatgcagtcagttgttgatcaaaaagtcattatggggtacacgacttcactttaaatcatctctagattacttgtaatgcctaatacaatgtaaatgctatgtaaatacttgttatactatatatttaaatttttaattattttttactacgtcattttttctaaatatttttgatcttcagttgattgaatccatggatacagaacccacaaatatggaaagctgactgtatatgcacttttttaagtttgcattccctgaaaattcagacacattgcttctttatatcaccttctatctaattcttcttttaagaaaatctttgttcaactaaaatgtagggtctcctggagatgttagagggcagaaaaatatctgagtactttcaaaagtacagtaaagtttcattagaaaacctaaaacatcgtatgcattctttttatgaaaggcaatatcgatgctgatgttcaagtttctgtcttgatatcaacacaaaagtcttggactcatagctggcagaataaatcagactggtaaatgtgttttatttagcatacgcagccttatttttttcagtggatttttgactgccacccttaaaaacctgatggcctggccgggcgcggtggctcacgcctgtaatcccagcactttgggaggcagaggcgggcggatcatgaggtcaggagatcgagaccatcctggctaacacagtgaaaccccgcctctactaaaaatacaaaaaattagccgggcgtggtggcgggcgcctgtagtcccagctactcgggaggctgaggcaggagaatggcgtgaacccgggaggcggagcttgcagtgagccgagatcgcgccactgcactccagcctgggcgacagagtgagactccgtctcaaaaaaaaaaaaaaaaacctgatggcctgacaacagcgaccacattcccagagaatgactgagcagtcattgtcctccacagactcaacatgtgctttccaggttttcagaatcctagcccacttatctcaaatacagaacccatgcaacccctcagggtacttttcaatccttcatcaatcaactttttaataaattaatacattatttgatgaaccaaaaaaatacatttttactcataaagggttctaatgttctaatttttcaatgtgcttttgtatacattttcttaattaccccaaccatctcccaatccaacgactatacctatttgctgtttttgatagatgaggaaacagggttggctcctttgcagacctggcatctgacagaaaccatgagcatccatccagggcattgaatgctaacctcattcaagctttccaagtcaagggctgaagagccatgaaccaacccaactgttcacaaacagtgcccttgtcctgaagattatgccgtgtggtttaagcacaagaaactactagcagcagcatctttaaatatttacaagcctctaatatatgtatgtgtttatgttttggtcagtttgtctaattggtgggagcttggtttttataaattcaggatgccttcaatgcatgggctttttattcacatcaagaattagatatagtcccaggtacttgagggctagggcaggagaatagcctgaacccaggagcatgagactgcagtgagctatgatcgtgccactgtttgacaaagtgagactccaactctcttaagcacacatacactgtggaatactatgcagccgtaaaaaaggatgagttaatgtcctttgcagggacaaggatgaagctggaaaccatcattcttagcaaactaacacaagaacagaaaatcaaacaccacatgttctcattcataagtgggagttgaacaataagaacacatggacacagggaggggaacgtcacacactggggcatgttggggggtggggggctaggggagggatagcattagaagaaatacctaatgtagatgacaagtcgataggtgcagcaaaccaccatggcacgtgtatacctatgtaacaaacgtgcatgttctgcacatgtatcccagaacttaaataaaaatatatatatatagagagaaatatagataggcatttttcagctataaccttatccagcctctttacctagtatgaattataataattatagtaaccatttcattaatactgagcagtaagtggaacagatcccactagaaaaaaactaaaagagaagaagaccaaaattatacattataatggcatcatttcaggagcatctgtaaggaataagccattcactaatgagcataaaccatatttatacattaattctcatcttcaatgcactgttctattttttctttcaatattttatttttccctggtcttcctttactcctcagcaggactcactggaaaaggcatgttctttgctaaaacaaggtcaataatattgtcattttcaactgtgctatcattttcacaggtccaagttgaaatgaaatcaattatgagaacaaatagcatagttctatcactaatgaatggatttagcattgtttcccatattcctaccacttaaaatggaagaaacagagcaaatgtggtgtacagaaagctcaaatagtccatgctaatggtggaaatgcttaagtatcatctgtatacagctaatataaaccaaagtggtttattgccacggttttgtgatttatgacccacattatgactttattttgaaatggttgcatgaaatattaatgtgtggtgaaagaacacacaacaaggagtagagatcacattttatcagatgtacgggtgctcagtgatttcttcctcataagacactgagctccaatctcaggatcctatttgttcccttactgtaatcagcccctcataatcaaactttccaaggtgaggcagctctacttttgctcctagattataggttatgtaccgttaatttttaaaaggatggaatagtttataacaaatgtgaataatttatagcaaatgttctcagcattgattagtgtccttttgaaaaagaacgtcttcttgatatgcatcatttctctaatgccttatgaaaagtcagaaaacctgttactgcactgcttaatggacaaatcaagtttaattttaatcatatataatatgaaagataagtccctatgtttttccctgtttggaatttgccaggcattaacactaagcattagctcaaagcaatctaaagagaagttaacaataggagagttgcctctcctttgaaatttacattttatccgggttctacaactcttggatctatggtttctacagttgtttactgtgctgcctcttaggtcattcctcaccccacttcgcaaagctccaatctggggccttgtttaagtaacagattctacaacaacaactttactgcacagtaaatcaatttacactgagttcctaacttcattttaatttgatcaactatatctgatgcataaaaaacagaatatctttttgaatcatcatgaaagttgtttgatttctattgtattgaagtccccaatcataattttattctactcttatgtatttttaaatgtcaattgctataaataaaaataacataaaataatagctaatactgcactttctatgtgcatgatgtacactgtctaagagctttgcatatattaacttactgtattctctcaataacctggaaataagtactgttctaatgcttattatacaaagaggaaactgacgcacagaattggtaagcaacttgccctggtaacaccaccagtagctgcagagctggaatgaagaactgagctggcttgccttcagagtccatgctctaaccactatactaccatttctattgtcctttgcccagaaacatttggtttcaaagttctttgtaaaaaaaaaaaacagaaaatgataaagatcttatgatttgggattgcaggatacaaacctaactttacaaagatccagtgttaataatagatgtgtccttcaatatctatggtcatccaaatggcagaatggctccttccattctctgcaagggctccctgaagcaaatccccctccaaaatcctcccagaatagtaaaatgcaaagcaaagagtactttggtcaagaagagcttgcatataattccaaactaaaccacttcctacctgggtaatccagggactgttattgaacctctctgagccaagatttttatttccaaactgagataataacactcaccagtagtacagttgtaatcattagagataatgtttgtaaagtgtttggcatcaagtaggctttcactatgatatataatagctgttaccactgtttttgttctatcattgttattctttctgcaagcctatcctcggaatgagtcactgcatgaatgcagggaacgcagcctttggtaacattaacccttaagatctttagctaactccccttcccctttctaggagcactcaaacttttcttagaatgtattgagttaaatccatatgcattcttaacctcaaacagccaatgaggaaatctagactagagacactgaaaatgcaggggagggtgtgacggttccacataaatatcactgctaaggaaaagtcctttcagggaaaacacctcactctcacctgtgtggttcgattgtaaatacctgacctccaggattccttgtctgttaatgatgagtctgttcttacttgggtaacggcttcactgaagaaacagaacaaaaagcaggtaggaaagaacacaagaatccctatgatttgggaaaagatgacaaagggaaacagacatgagagagaaaggaagaaagaagagagagggagaaaaactgtcttccagagagaaagcaaatcgatagtagacactctgtggggaataactgtggtagaaatagaatggaaactgagccagggtcatttattgttttgtgcattctgttataggaaagagcatgaataacaaagaaatctgtccacagacatggaacacccccacgacagaacaggccatttccaatgctatgggtttgttttttttttctatttttactttctaaaatgaaatagcacaatacattctaatggctgcttaggtttgtagcttagttgtcactggacaagaggaggaggtctaactgctcctcccaacctcaccggaggtggatgaaaatgcagccctttctctgcctaaaggcatcattctcaaatatgtgatttttaaagttgcctctatctcctaagatacactcatgaggtgagaattgtccctgcttagagcaattatcaaaatgctgcttaatttttttctttatatttatcatgtgtatttatacctttctttttaccctcttgtgtcacagggaccatgaccacttttttctctcttttttttttttcctttttttgagggagggtgtcactctgtcacccagtctggagtgcagtggcatgatctcagctcactgctacctccgcctcctgggttcaggtgattctcctacctcagcctccctagtagctgggattacaggcatgtgccaccacacacggctaattttcgtatttttagtagagatgggatttcaccatgttggccaggctggtctcaaactcctgacctcaggtgatccgcccacctgggcttcccaaaacactgggattacagtcattagccaccacgcccaactcatgaccacttttaaaaaacttttctgcctcctttctctcatttttctgtcccaattttaatcttcccctgagtacagctcagaacccaacccctatgacaggacttcagtctagcaccctgcatctctcctttcaatgacccaattgcctggctgaaatgagtaaatgccataggaatgagatctatatcaataactatcaacgtatgctctatattaaacattcttaaaagccaaaaggactattttgtaggggctaccacactaattagaaggcaagctctttttaaatacaaccgctcatgtatactaaacacaatcactctcgaatactgttacacatactgtggttctagtgttgttgacaagtagattattaagtaaaccagttgattcatggattacccacgcacattaaaaagcggaatttggcaaatgtaaacaagctatttgggcttatcaaagctatgtttagactattgctttttggttattaaaaaaagaaattctctttgtaacaattgtgaatggaagttcattcatgattttggctctctgcttgtctattgttggtagaaaatgtggtacatacataccacggaatactatgcagccatgaaaaggaacaagatcatgtcccatggaactgaaagccatcatcctcagcaaactaacacaggaacagaaaaccgaacaccgcgttttctcactcataagtgggagctgaacaatgagaacacagggagggaaacaacacacactggggcctgttggtgggtgggaggagagaaagcatcaggataaatagctaatgcatgccgggcttaatacctaggtgatgggttgataagagcagcaaaccaccatggcacacgtttacctatgtaacaaacctgcacgtttgcacatgtatcccagaccctaaaagaaaataaaatttaaaaaaaagaaattgacttttgtagaagagaagagttcccaggatatttggaatatcatgcattccagactctgaaaggaattataagttccagtttcaaccaaaattttttccctcaatagttaatttcaaaaaaagaaaaaggtaagatgtgtatgccattctcatgagaagaaaacaagacctaaaacaaacaaacaaaaaaaccagtctaggccctaaaccttatatgaagataaagaaaggtcatcctcaatttcaatttactttatatattctttgagaggtaaccgtgtcttatctccccccaaaattccttttaaaaggaaatttccaaagatgctctattctgtgaataaagcattgtgccacagccgagaggatccagcaatgaacatgagattgcccttgattcataaggtctacaagctagtaaggatagagaacactttaaaataaaaaaaaatagtttttggtatatttatattgtgtatttggtataattgagttttctacattctcatatatgtatttcatattttgaagaatatgcagaaaataatcaagcttccaaataaacatttttttttaagaactgcacaagtgagaatttaggagaacagaagatcagagggctgcacgggctaaactagacaatgagcccatgcaagtaagttaagaggagaagcgggtaagtatgcacctgctttgtctaggtgaccagcaagcatttagcaatagtcttttcaaaacaacagctccttatattgtcaaatctcaagaagtaatatttatggttaaaaaaatctcagacccaacagaaaatccatgagggagatggttttggaaacgcagaattttcagctatgatatccttttataaacaagcagatactttccccaaatataattcaatgcctcagtctacctcctgctgaaaccactaacaccaccactaaagctcgactatatgggaaaatttaggtgtcactttcaaaatatgtcctagcataaaggcaattaaaaaatgtaaagcaccaaagatgcaagagagacataaatgaataaaatatctggcacgaaagttttcaaaagcttgggaatctgattcaaaaaaaaataaaatcagccaagcagtgttagtaagttagccaatcaggtttcaagaaggcagaaagacaaaatcaacatcaccagcatttgacaccgctactgggggaaaaaagggggatggagttcgtttatggcctttttaaaaatgccattacttggacaagagtcataacagagaagcactgcttatttcagttctgttaactgtaaatatcagagccaacacccagaaaaagttcaccattagccaattggttttgcctggccaattggagatggtaataggcctgctatggatgacattctttctgatataagttgtttcttgctttttctccctctctactgtatgtctttaaattctttataacattcctttctcactactattcaattagctttcagatgagtgaggagcacctacacaccaagattgccactgtaccaagtatcatcacaagagttcacaaccagctgcttaaaagtaattggcatcataatgtgcagaaaaaaatacttttctaatggttgcctggaagatttatatcactaaaatgtaattaaaaagtagatttagaaatatactcagcaaccaaaaagattaaatattaatgtgaagtgtaattaataaattatacatctcttgattactaatggcttattgactgtaaaagcataacattatggaatattagggcaaacaaaggcttttggggaatattgttcagcttcaaggatgctgctgctgctgctcttgaatttccagaagaaatcctgatttttgcagagaaaataaaaatttgcctaattatttccattaacattctttactcattctatatgtcactgagtgtgtcgttctttacaaaatgaaaacttggtagtttcctgaatccttttttattgcactaagacaatttctgctgcatgttctactggctatccggttgaaattaagttttacatttaaaagtagttctgaacctcttatacaaaaataaggtgtctaataccattggcagtgacatcagtacagataaatatctggaatgaggtgggtgtgcgatgggtaatgcctgcagggcaatgcagtctgcagaataagacaaaaccatggatagagagagggggctatccagacatcaataaacatatgtaaactgcaatcacctcacactctcttgaaaaattttcaggccaagtgcaggggctcatgcctgtaatttcaacactaggaggccaaggcaggaggatcacttgaccccaggagttcaagtccagcctgagcgatacaatgagatcttgtctctacaattaaaaaaaaaaatagcctggcatggggtcgcatacccgtagtcccagctacttgggaggcggaggcgggaggattgcttgagcccaggaggtggaggctgcagtgaaccatgatcttgccactgcacttgagcctgggcaacagagcaagaccctgtttcaaaaaaaaattcaagatattcatcagaatcttagaatgtgagagttatagaaagtgccttgggggttatgtagcctaccagcttcattttatataagaatttggaattctcttatgcaacgcagtcacatgacttaagatttcaaggatagtcaatggcagaatgggagcaatagctcaggtttcctcacactgatagcaataggaagccaacaaattcttaggcagacagggatgggtccctggtgaaactcgaccttcaagccaaggacagtctgaagccctcaaactaccagttctggacagagtccacagactgcagtgacaacttccattcccattgggtgcaatcagcccctgattggtcccaggccaaggttccgggccaagccttcccttcagcccccagtttgtcccaggccaagctttcacttcagtccccgattgcttctttacactatcgtaccactttctgaatgagacagccctgggaaagggcaggaaaatgccacacacagagcccggacacagtgactacacctaagtgagtgctccgggactgtgggcaaagcacagtcagtcatcctgagtgaacatccagaaatagggacctgatcagtttctcctcttgcttgaagcccgggaggttcccttcttggaaggtgtggggcttgtagagaggaagtcacctttgtctgaagaaaagatatcccttaattgtggtgcatatggccccaggtgcaacatggttaggggagggcacacagcctggattcctgcctcagcctaaccagcacagcctctgcatgatgcagagacaggcaacaggattctggagtccctcctaatctagccctctcctccctccttgcagcctggcttctgtgcctgctccacagggcagcctaacctgcacagcccgccatctgcatgatgcagggacaggcaacaggactctgtcattttgttgcttcttttctttgaccaccaattcagtagctgacaacaacaaaaccacctggaaactatgtggacaaatgaacacggactccaagtctccaaaatacaaactcatttgctcaactctaatagaaattgtatcactggaaattacttttctaattatacataataacataatcaacaaatccttatgacgctatatttctgcaggcaaacaatgttcaatgtcaccagcaagactacttatttaacaaggaaatttttttaactgcttaacaaatcatcagtggtttagaaatttcataaaatttctcatttcaaaaacgagaaaattaaggccttgcggggttaaatcgttatcaagtaatcagtcggctcactgcccagtgtggacactggccaatattatggcaccagcctttgagaaaaggaaacctttttttgaatccatctccctgacctggggtttgggttgggttttatcagcatagggtgacaggcaagttcaatctgattggatcctggatcccatcatggggtatctgttcctaaatcattccctgatcctcggtcagagcgagcgcttaggttcccgctgcagttaaacacctggttcatctgggcatactaaggttatgactttccacctgggagtccacgacaactgaaaaaactcaaaacttctttaagtagaagttgagcctgaagctgaggcagctgtttcagagaggaggaggaggaggagatagcaaatgtcaagggatttccatttctctttcaatgccaacatacttcagggcatcagcctggctgtatctgtaatcaaaaaacagttcttcgcaagtctggatggctctcctgacaaaaacacctatcctgtgatcaccattaaccatcataacttttgcatagcagtttggatttaccgaatgatttgcaaaacgaattttgttacccttgcaggttgcatccaccacaaaatcattgttcaagttgaacagaaagctgcacatgtatttatcacacactttccctcttccgtcagcttagcttcaggaacctcgagtactgtgggcaatttagaaaaagaaaatgccgtttgaaattctgaatttgcaaagtactataagaataatttatagcaatgagtttaaaactcaactttttattgccttctcaccagctgcaaagtgttttgtaccagtgaatttttgcaataatgcagtatggtatatttttcaactttgaataaagaatacttgaaattgaaaaaaaaaattgagtctgatgggtctagtgtgtttataaaatgacttaagatcccacagttattttaaagtaatacattactcaactggtattcattttgatgccattattttattttataaaactagtcatccttgcagaagtgtatctgattaactcttgacaactactttgcctattttattaacagctgcatttaacccacgtgacaggataactaatttctattgtttttgtatttttgcctcctccttccaagatagcagtagagtactgtgttaaatcttgcttcagaagagcttgtttaaaatagttataaagaaagtaaaatacatagaaaaacacgttataattttaaattaaaaaagaaaaaagatgtctactctgaataaattatgcatacatataaggtctgaacaaaaacatgaaaagatgggctctgagtatcaattttaaaaatctttaccagtataacattactcaaacaaaaattaaaatttaatataattaagtacatattccaagacaacaaatggaccttgactgttaattctggaaaagatcccaaatactttgaccagtagtgcctaaaagtataaaatttatcatgtggcattttatcagacatgctgtggttatttaatgagactcacttttgcagtttctgttggtaacacaaacattttggactttcattgtttacatccacaatcccttatgacaacgtcaagatccaaaaatttctggaaactgaaatttttgtgctaattcatctggggacaaatcctgtcctgaagagacatataactattaatagtccttatcccactaatgggactactgatacttttgactatagaaatagtaacaattttgattgtggagcgatgttgcaaaccctgtcagggctgttacagcgtgtgtgatgcgggtatcataggaccttccaaaatcggaaaacctccaaatttcaaacctcggttcaagagatagatgttgggcctgtattctgtcctttttcactgtggaatgtcgtcatcctctaaggaacagcatccaaatccctttgctgtgcttcctcccttgatcacaagccacacataacccaaacttgagcagcatttggtgttaatcacctgaaaacttcccagcaaaatgagtcaaggaaaaccatccttggcactagtggatggtttgttggaaacccacaaagatagactcgggatcgtgggctatagaagtggtgacaagtgaaatctaacatatgctattttaaatactcatctgcctaatatattctggaagctctcaagaatgtaagacactaatatctctaaaatgttttctattttaaaatgaataacagtaagggtctgtgatttggttttgaaagaaaattatttcccagtaatttaagcaccaaaaatatagaacaatatagtattttacatttatgcagaggtgctctggaagcggaaaaataagaacaattaagctttgaatatttcaagttttaaataaattttaatatttggaaaaagaggtcattaaatgttcaaatccatgcggactcatacatatctgttacacaaaagcatcttagtatccaagttgactttttcttgaaataagcagtattttctaccactttataaccaaatcttagtctatgtcttcctgtgtaaattcatcaaatttaccaaatgaacaggcagcacaaagagagccactgaaccctcaatgagtaaaggactccatgggtaagtcatattttgggtaacatattaacactttggagtctgctcaggggctgtttagcatatttaaatcatgaataagaaaatcaacatcaattaatattgtccctgtgcccggaggatacttagcactgtctattggactcatgtggaaacagtcattaactgtctctgttctcaaagggcactttccaaacatacgataacacccatctggttctttccccaaacctcagaaaaccaacagaaaatgtaattttagcaaattaagagactgttttttaatggatactgtacatcagctggcttaaatctgtgtctttgaggtggtagaggaaggactgggagaaataaaggtaagaggcagagaactgatgacaagaacaaagaaagtagcaaaggctggagagaaggctctggttccttgggctgggtgtccacagagtatccccttccccagggcacacagttcatccctgcattcactcattcattcatctctgtgtccccagagcttgttctgtgtcaaacattgtcctgggttctgaggacaacagagggaataaagtaactcttaccctcaaatatacaatggggacagtagtggtccctacatctttgggttatcgtgaagattaaataagccatcagaataaggcccaaagcatatcttacaaggcacaaatgccctgatattttttaataaaaaaactaaaagagtctagtttggaaatggacacatagacattttaagtgcagtgtgatgagggaaaatagaggatacagcagaagcagagaatccaggctgcaggagggaggagaggggaaggttaggaggggctccagaatcctgttgcctgtccctgcatcatgcagccggcagggctgtgcaagttaggctgccctgtcaagcaggcagagaagccaggctgcaggaaggaggagagggctagattaggaggggctccagaatcctgttgcctgtctctgcatcatgcagatggcggggctgtgctggttacgctgccctatggagcaggcagtaacccaggctgcgtgccctcccctaaccatgttgcacctggggccatatgcaccacaattaagggacatcttctcttcagacaaaggtgacttcctctctgcaagccccacgccctccaaaaggggaagctcccaggctttaagcaagaggagaaactgatcaggtccctaattctggatgatcactcgggatgactgactatgctttgcccacagtccaggagcacttacttaggtgtagtcactgtgtccgggctctgtgtgtggcattttcctgccctttcccagggctgtctcagaggttgggagaagggccagactctctagtagactctgacaccacctagaaaagctacctgcataggccccccagtcgggggtgctgagactgcctacttagttgccagcacatccaggtgtgggctagcctgtgggccacgtgtcttcaataaagagggggacactggaaaccggctagtaccacatagggctgaatgcagctgctgctggggttcatgttccatcagttaaagtctagagagaaagagaggagtgcaatcccaaataccccacctggaggtggcagcatgaactccctggcaggtgacataacagggacacagcaggaggcgaaggtcatattcgaggtggtttctgcatctgttgaatgagccttgggagcctgctgtgtgcgaggccctgagccagggccccggggattcaaaagtgaataaaacacagctccagggtgcatattcagctgcagcagacagatgcacaagtacttgaagtaaatggtttgagggatggtgctatcagcatacaagactccacagaggctataaagagagagggaccagctctatatggcagagactcagaaaagggttttctgaaggaagcgagctgtggactaagattgaagctaaggggcaggggtggggtgcagttctaggtggatcctttgccacacaagcaaagagaaagaagctggaaacagcctgcagcctctaggaaattcagggactttagtacaactggaagggggtcaagaggaggctctaccaagacaggaggcaaaagggaggctggtccaggccagagacttgaggcactggaatgccaagtgaaggaatctggtgtcctttgggtaagagtaagcaagggcccctgaacttgggtagtaatagcagatgttgcagaggaaacatcagcaggatttggcaccatattgccaggaagaggtgaagtagcgcagtaggctaaggagggctccaggcaataacaaggatggaagcaataatgccagcaccacacaccagcccttcctgtgcacagaatacacggtcccatccatgcccaggggcttggcactggtagtggcagggctggattgtcactgacgccccaccactggctccactgggccaggctgagctttctgcgtggagggagccggggccaagcgatgtaggtgcaccctggagaaggtgaggggctctagtcccaggctcctttttcgtttcctggcctcccttgtgattgtttccctcccttttaccatcaagtcaccctgcatactccactgtatgaacagatcacacgatctgccttcaaatctgctcttgagaaccccgggcaaacacatactcctccttgccaagaggcttctcagttccatgtccaaacgcacttgctccatcatccaaggcctgtgctctaagagagagatcactgtttttaggtagagttagagctggcagacaatgcccaatacccccaccaattgcttagagcatttatcagtcagggagcaggctgccctggggagtcatctgcatcagctcaggccctgggcctcacaggacctctcacaatgtggtcctccaggcccatggcctcccccaacccatctgtgctaaaggctaactatggcacccctccaagaagggggtcctgagttaaaccccaaactccagagtcccttatcccatctgtttcctcagtccatcccaccccccatcccaaggtcttgctcctccacttttaaacctccaaggaaaccaaaaataactcaatacgtagctcagggcttggggaagctaccttcaataccttagaggattatattggaagtgaaaacaaaacaaagcaaccatgactcaatctctctgccatttataaattacgaaaataaatattcactaattcacagaggtggtgtggatcaacctttggctttgaactttcaaggtttcagaagttcctaaaattgggtaggtctctatgccgtacaaatgattgtttctactgttaaaaagaaagacatgaggataattttttgcccacgaattgggaacctggataatgctgtgatgccatggagtttatttcaattctttagttatgtatataataaagataaattctgaatttacagaaacttgaaaaaaaaaaaaaaaggaaagacattcctggtgcatgttagtcaaacttctgtttcctgagtaaactagggacccttggatgagacttctaattccaaatcctaacaaagtactacataggtaacattggaagttatctagtgcctgtgacctttattttgctcatttatagaaaggggataaatgaaacccacctttcttgtgtgggctcaaaagtgacagcatggatgtaagcattcagtacattgagaagctgggtgcgccccttctttcctaatggatgaaacacacagcatgagaccataaaagccagagtccttgtacattatggtctgaggatttgcctgcttagaaacatcagagaccaaattattcaaaaaaaggaaaagccaaaagcaaggctcaaaatcttacgaagcaaacatcttggggctttaggggatgtcagggttaattcactgcttgctgtccccctggtttactcttcccctcatagaccccgtttatcgaggtcagacctggacaattctctgaagacacagagcagcaaataggagttaagggcagagtgagctgggttcagcagtagggagaggagaatttctcagcattgttttcaagctcaggtgaatgtcaggaaaagaactcacatcatttccaactgggatctaagaattcactgagcaccaactattggctagaagtatgctgaacactctaaatgccttacctgaatctcatctacccctcttagaaagtaggcatttcaaaatcatacttctctaagttcttaaagggaacaacaaagaaatgtgcaatgtgactcaatgacataagccgtggtttaagcctgtctgcgcttttcgagagtaatcatatgtaccattttgtaagccccttgctacgtaccagacactgtgccaggtgctccgtatgtattatttctagtattcctccccagatcctacatgtcagagattattattattcccattttatagataagaaaactgactttcagaaaagtaaagttacttgctcaagcgcacagagcatgtgggatttaaagccagaattcatctttctctctggtctatttcctcaggattaaaggctcacactttaagcactgatgaggcagaatattactgatataactcgtttctgatctatatagactttggaaatatctcagggtagccacttcctggcctacagaacactaattttgttcaggcagtaacatgtcatcctggctgaattatttgttctaggaaaatcatgaaaaccccaattgtcttagccagtgactggtttagtgattgctatgtgactctcttctgaccaaagagatgaaaaaaagcctgttctttacttctgggaaagactttcctccctgaccgagaagacctgtggaagagaaagcccttttgtggcagctcctcctgctatctgtaacactatcatgtgaggacataatggttggagcaggggcagctgtcttgtgtgcatgagtggaaggcagtaggcattgctcatactctaaggatatcggaatgaagaagaaaaactttagaagcttggtgtccttgtaacccctcaagcctaccctgagaccacttccatgatttttgtaacatcagtaagtgttcttacggcttaagccactgtcaacaaattttctattactccaaatgcatcccagctgacatagttataaagtagaatcaaatcataatttatatttattctgaaaatgaaatttgagtgtttttggtggctgagttgctgactctgaatatggctctactcctcaaagtcacctaaaaggactattagtgacttggagatttgaaccaactctaattctttctttgcttctgtaggagaggcaaaacttttcctcaaccctcttaggttctgcagcagaggtttgcaagttcaactaacgaaagccagattagcaggagaaacgcatacagattatatttgatgttaatttttttacatgacacaggggacttcgtagagaagaagtgaaaacctgaaaggaacaggtagaattgagggcttatataccattttaacaaacagtgataaatttgtggagaagtgacacgataaagaggtttgggacaataaattgtgggaaaaggactagaaaatatactggggtaaccaatgaaacaaaagggttattttaggaaggtttatttgtacagactcatcttggtatcatctcgccatctctgatgatacaaatgttatcttcttcctggtaccagaatacctttctcataggaaatttatgccctccttttagggagaaaagtagggggcagatagcccttcccatatctgcttttcttaattgccttcagctcaaaataatcaatatgccaaagcagcatattttggggtgacatattctgatcacttttacttcaaaataaataatatatctatgattttacctatttaaaatataatgtatcttttatatttaaataatttatatttaagttttaaatatagatataattaaaacattaattgtataatattgtcataatattactaaattgcctactaacatttaatcacaatgattactgcattttgcatttaaactttttaaattagtatgtaattattataacttaaccattaaagaaatgcataaagcaaaagtgaaggctatcccagaattaaaatgtactaaaacttcttttactaattataaaatgaatttacattgtatctgatcttcacccatgttgtgtgtatgaatagcttaattcctttcaaatgagcagtattccactacacagacataccagagtgtaattattgattctcctactgataaacacttagattatttccactttgaaactattatgaaaaatgctggtattaacatccttatacatgttttttttagtggaactttttcgttttcatttctctgggctggagagcaagcaaagctaagttgtaaggctggaaaacagaacaatgcttgctgctaagggtggcacaagggggtttctgaggtcatggaaatgctctatgccctgactggtatggtgattgtgcaggtatatacgtttatcaaaacttataaaactttgagccttaatgtgtgtaaattatactctatttataagaatcataaaaaagaaaaaagaaaactgtccaaaaagaatataagattatggtaggtgtagagaaccggcggttggcattccttccagccatgctcttgcatgtcttccaaactgcagatgctggaaagctgagaaccacatttctcagattcccttgaatcaaagggaaggagacagtttgatcttcacccatgttgtgtgtatcaatagtttaattcctttttaatgagcagtattccattgcacagatattggagtcaaactggcttcttcaaactgtataccttcatgtaagatttgaaaggagaagcaaacaggggcagaagtggaggccatcatcccatgaactggaaggcagcagggatctcctgcagttcctctcccataccaatggccagggcagctggacccctggcaaggccaaatcaccatcccagtgtccagttcccagcctcatgcctgctgaggggcagtaagagcagcagcagctacagagagaagctacaagtctagtttgttttgttttgtttttttaaccaggaaccttttggggcatgcataatagttgacagtattatatagtgaatacacatatatctatcacccagattctacaattgttaacatcgtgttagatttgctgtatcatgtatccaccatatattcatccattactcggtcttattttctgattcattgatggtttgtattttaactcagcaattccactggtggcctcccgctcccaatcctgcccaaggtagtggcttctctagaggaccagtgcccagacttgttcttggagtcttcctgggagccagccaggccttccaatgattgtgtaggttcctcattcatcatccctgctacggtttgttatactacaatgcatctttcaaaggctccaagatagttcatgtagaattaggagttaggaggtgatgtccctttaacatgacaagtgtgttgtgttggttcatacatgtttcttagcaagagaagcaggaaaagacgaatcttcagcttggctacaaaatacttcctagttctgtcccaggaaaattaaacatgatcacctacagcagaggtgcccccaaacttgaaggctcttgcaaggggctggttgctctttctcttgtgctaagagcttccatctgcatttcctcaatccacaagacagcattttgcttttttttaatttttcatttttaacattcttgaggctaagtccagtcatcacatttcatgcctccattaccgaactgtccccaaagttacaagcatcatgtttaccaatactgtgggtgcaaagtgatgtaggttttggtggtgtgcactgaacctgtataactgtgttaataattttgaagagcacaaggtttttcaggtatatatatatatatatatatataatgttatagaagaaataactgtattaaatcaatttctggttaaaacagctaaagtaactctgccacctgcaattgaaatccgactgatacagaaataaagtcaagcatcccgccctacccgagatcccagctctatcccagttaataaccatcaaagacagatttttggatcctttcacctaagagactatattgcagatgcctctctatactgggccgcacttatccacattagctgagcagtcactccaacaccagggcaagtagttctccctcattatctggggtttgctgtaatttctttaaacaaccttcctcctcctttcacctatggacacttaggatgtttcaaccattcatcacgaggaatggtacagttggcatctttcaagatactactttacctaagagactgaacatgggttcagggtgcttcctgagagagtgcacatggtttgctgttgtcccacaaaagggatgttctatcacactctcattgagctgatggacatacaagtaccatcaccagccaattttaaattcatttttgtcattggccacttgacggattagaaaaaatggcatcttgtcttaatttgagtttcttaatattgagaagggttgaagagttttttgtttattagccatttacctttttccccctatggattgcttgcttttttattttaaattgatctgtaaatattttatatgtcaatgaaattcactctttgtccaatgtatttgaaaatgtttgggctcaccatttgccttttgattttacttattttttttgtcatgcagaaattttcaactttttagtaactaaaatcaccaatctttcctgttattttacctctgattattatgtcatgtttacaaacttctcaccctttccaaaaatacatacagtctttccctcagtattcttgagggctttggtccaggacctcccacagacaccaaaatagtggatgcccaagtccctgatagaaaaaattgcatagtatctgcatatgacctatgcaatcctcctgtacactttaaattattcctacattatttataatacctcatacaatgtaaatgccatgtaaattgttgttacactgtattgtttagggaacaatgacaagaaaaatgtctgtacttgttcagacacacgcagtttttttttcccagacatttttgatccaaggttggttgaatccacatgtgcaaaacccatagacacggagggctgactgtatatataattatttatttgctagtaatataatgttttttatggttaactctttggtccacctgaaattgttttggtattgagagtggggtttttaatccacatgggtagtaagttggatcgacataatttattgaattatctttaatttatttgtgaatgaatgggctccctatgaatttttagctatttctggaacattctgttcgatccatatgtctgctgttactccaggtccaaatcttttgatagtgtaggtaatataagaaaacattcaatatatggtataaattggctcccctcttaatactctcctcaaatgtcatattttttagaacctgtggtcagaagccagaagcaggcacttctaaggaggagcaaaaagagcaggaatttattctgagcagggtgaccaaatatacatattcaataagctacaggatgagacatgaatatttatgagaagagatacacatgcatgtgcaattgagcttcctgcctctccgtgtgacccatgtacaaaaaatggtggtactagcatgatccgagggtggaatttccagtcctttgaagtctaaacatgaagcagaggacatgcaaacccttactgcacattctttatagattatccagcatcatttcatggttggtgatctcttatcaggcaaaagggaaggagcattgcagctgcttgatgtcagtggtggagtcttttgaaagggcttgtttctgtttagcccttagggaaggaagcctaattttggtgagtgagggagggggctgtattagtcagagttctctagagggacagaactaataggatagatgtatacataaaggggagtttactaaggagtattgactcacacgatcacaaggtgaggtcccacaataagttgtctgcaagctgaggagcaaggaagcctgtctgtcccaaaatctcaaaagtagggaagccgacagtgcagccttcagtctgtgattgaaggtccaagggtcccaacgttgaagaacttggagtcagatgttcaagggcaggaagcatccagcatggcagaaagatgaaggcaggaagactcagccagtcttgtccttccatgttttcctgcctgcttttatcctggctgcgctggcagctgattagatggtgcccacccagattgagggtctgggtctgcttttcccagtccactgactcaaatattagtctcctttggcaacaccctcacagacacacccaggatcaatactttacatcctttaatccaatcaagttgacactcaatattaaccatcatagaggtataatgaggcatgtccaacctcccatcccctcgtggatgagaactcagttttcaaggttactctggagccctcttagccaagagaatatccattcaatcagttgaggggacttcaaattttatttttggtttataggtggaagactcagagcccatcaggaaagcacgaagaaagcaaactaaaaaagagaaggtggtggacacttggaataataaaaaaacaatcttcttagaattgtgtttccttaaactttgggaaagttaaaaaaacaactctctgctttcaaacactaacttgggagaaacaaagtctgactgtctgctggtgacggattatcaacaccaagtgcagtaaacctcattaattttccctaattgggcagaaagttttggaaaagtctgaagtacagaaacaaattcaacttaatttcaagttcatatggtaacaaggatgacagggcctcaggaagggagagagcagaatgtctcagagaattttttaagggtttcaataatagatatttttaagtcattaggaattagaacactccctgattcacagaagcatttaaatacaaaatggttttacatgtgtttagaaacctttgttggcctccaaccttaagaagactaaatatttcccttgtttatacttttaatttgcttggcaaacccttcccccgcttcaagccctaatatataaatgcacttcaccagcattttaaatttatccccgattctgaattagtggacttctcactggccaagattgcatgtttttttccctcaaaatcctcaatacttttatgctcccaggaaatgtacctgtcaatatgtcatgtgcattctctcattttcttaaaagcaggaactaagtttcatttttcaccctggattctaaagcagttggagagcttgaaagtgaagggactgtcagagagggagcaaatacatctaaccatggtgaaaaggtgatgaaagacttgtgcctacatttcctcaatttgttcttaaaataattgttgacacactctgattgaggaccaactcttgattttccaaggcttaggtcacggagattgggaacaaaagacacagttattttaaaacacaaatgtgagcaattagttcccattttttgctcttaatattttcacagatattaataagtagctaagttgacttctttgaatttggtattttgctccttccccctgcccactctcttacaggtatgcagttggacagtgagctagttaagaggaatgacatgaagaaaatttgaaaatatcacccaggctatgtaaggtctatgggcatttctgatagaccaaacaaatcaacagtggatttaaaggggaaaaagatatgtgtgatattgggagggtatcttagtttgttctcacactgctataaagaaatatctgagactgggtaatttataaagaaaagaggtttaactggctaatggttctgccggctgtacaggaatcatagaagcttctgattcttgggaggcctcaggaaacttacaacaatggtggaagccacaggggaaacaaggtactttgcatggccaaaggaggaagaagagagagaaggcagaggtgctacacacttttaaaccacaggatctcataattcccgcactcactatcacgagaatagcacctagaagattgtgctaaaccatgagaaactgctcccacgatccgatcacctcccaccaggccccacctccagcactggggattacaatttgacataggagttgggcagggacacaaatgcaaaccatatcattccatccctggcccctcccaaatgtcatgtccttctcttactgcaacagaggggaggagactaaaactggggagtgtggcagatagcatcagtgttacaacagtgtccccacgcactcacggtccatatcacagtcagacgcgatactctttacctgctatataaacacagacaactcccaacctcctccctcatggaattcacccttacagtgtaccactgggaggctggaggtgctggaaagttaatgtccctggagcagctctcagcccagaatgagtgggagttggaggacaaatactcagcttttctccccttagggcaggacagctctgaaagcatattctaccctattgttcaatgacacatcttgcaaatgagtcactgaccagcctttgttctggactaccttgtcaaggatgtctgtatagaaaaacagctttggaacatagagataatacctccctctggaatgaagagcaggcatgcttactgcccattatatgagacttgggttccctaagtacaaagttcccacccactgattgtgtaagcaaaatctaggccccattgtaccatgaccatgggactaggggggcaaggagaaccaacacagtaatgctcatgctgcctgttgcgctgaaaggaatagaggcctttgtctctgatataatggtctcacaccatctgccagcatccatggcatgtggcaggccaactcattagcttctaagtatggggaagatctcagatccatcacagttcttaactaaactcattgacctcacatcatggaaagcagccaattgcaggatgaaattttaatttggcttacattaaaaaaataattttctaagaaagtttattttaaaactttattatattgctcagataggatcagaattaaaatggaatattttgagaaatggatctcctgtgtctttgtagccacaaaatttgaagttgaaccactcaagtacccagcaagtggcagacataccatgagcaatagagttaatacaatgattatctcagattgtgttgttgtttaaagattcaggagacaagtccagctccccttcctgagaatgaatgcagcctacaggaatgaggaactgtgaacttccggggtatatagtaatgggtatatacacagtgtacataataacagccaaatacaatgagttcataacttttgcttctcacttgtgaccctataggtcaatatttatattttatttgtttatgaatttatttattacagcataaaaaagtctatcttattaagcatatgccttaaaatgatgaatgaaggaaaaacataattaatgatggaaaagagaaaagttgttgagacacgtaatcttttgcaagttgaacgggaagagcaaacacacgtctggcactgggattggcgatgggcttcaagtccgaagcattttcatacttattcataggtgaccagaccatgtgcagaacagaaagacgaagcattaggaggttcatcatctctgcagccccatggaaagcggttacctctatttcacagatcattgaaaacaaatcagatcccagtatggcttaagaaccttggttttgctttcactaaaatttctcatacatggtaataaaaagtatttcagaaaaagctctttctagactacctataaaaaagggcttattttactaccactggtgctctctacacttaaaagtttcccaatcacataaggcacaaagttaggacaacattgaaaaagatagttatgtaagcttcactgcgggcaaaataaacttcacttcgggcacaataagcttcacttcaaatcagagacggaagaaagacccaaagccagggaaataatttcacccttgcttaatatgcttttcagattaatctcagaatgacaccaaaaggccaagataagaaatgcaggcagtgaatacaagcaaagagcatttaatattagaagcttacatattgcgtaagtgataaaatagtatgtattaacaatgttctcaatcaccttaatttttcatcattttgcttgtttgtttaagaactttcagtttcaaacagaaataaaattagttttctcccttgaaaataggatattcattgcctggcctgattttgacatcaatgttgtaagtaatttggacaacaaacatcctcaaacacacagtcgcttactaagtacctgtgccacaccagacattgtgctcgatgttaggaattcaaagaggaataaacagggcctatgcccgtgagagcctgaattctgatagagacattttttcccaagataaaaaaaaatgaatacgtgacttagttttttttttttaataggctctgaaaattggatttttttcccaaattttctgcaaaatggaaacccagggaaaaatgaagacaaggttttattcagcaggttaattacatcttataactatggtagaagcttccaatttccctactggggttggtagaaaatacacatcaaaatctcttacgtccatgtatgttctttaggttacctctcactttagttacttggtttcttgaaaatccttcaaccagaacaatgaaatggtcttaagtctgtgtttgattgggccttgatggggcaatggagcccaaggccaagagcatctgcaaaaaagtgaaaaatgggatcctcatagcccagcctagatcccaaagacagaagatcagctgtggattgaggaccaagcctccactgataatacagcaggttccttggcccatcctgtccttaacactaaagacagagtgtgaagaaccaaataacgttgcaggtatattccacaaactgttctctttcacacaaattattccagggaaagctccctacctcaatttatgacactgatataacctaggaaccaaaacaaggacattaaaagaaaaatttactataggctaataatcaatctatcttatgactagaaatgcaaaaatcctaaataaaatattggtaacctaaatccataagacttaaataaatacatgatggccatgtatgatttatctcagcaatacaggattaggttaacattagaaaaatctccaaatataattcacagcccattacaggagaaaagctatatgatcaccacaatagatgcaaaaaaagcacaaaggcaaaattcaacgtcttgcatggtaacaaaacaagtatcctaaacaagttaagaatggaaagaattcacttaatatgatggatggaatctatccaaattatacaaaatagtcaagaattagaagcattctcctaaaggcaacaaagcaagtcaggaacaaaacgagaatgcctactctagcttcttctatttaacattgtaccagaaggtcaagatgagaagatcacttgagctcatcggttcaagaccagactgggtaatatagggagacttcatctctattaaaaaaaataaaactaaatgacattgttccagagatcctagccagcatgacatggcatggcaaaaaaataattgatataatcatcagaaaggaagaaataaaattgtcattatttgtaggctatatgattatttacttagaaaattcaagagaacctacaacttatcagagcaaagaaatagaggtaaaggaatagctcagatgaactgattagagagattaacaacagaccaacatatgcatgtgcatttcacatatggcagaaggtcatataaaccagtggggaaagaatgaactattcaaaaaatggttctgggttgactgactatccatttggaaaaaaacaactttctttcattccagttacaaaaaaataaattccagatgaatttgaaaaggttttctaaatttaacatttatggaagaaaaatagagatttgttttagaactccaaggcagagaagcatttctaaaccaaggcacagaaatgacacataacaaagaaaagagtgatacacttttttgctatattaaaatttgaaatctctgtgtggcaccataaacagagtgaaatctagaagccaaatactggagaagacgtgagcaacacaaatagctacaaaagagactttctcttaggtcttcttggtcagaaataggtctggggaagcaaggaatagggagagatttgttgaaggacacaaaattatggctagataggagaaataagttctagtgttctatacccctgtaggatgactattgttgacaataatatacagtttcaaataactagaaggaggatattgaatgttaccaacacaaagaaatgataactgtttgagatgatggatatgctaattaccctgatctgatgattatatattatatgcattgaaacatcaccatgtgcctcatggatatgtacaattattatttgtcaattaaaaaataaaataaaataaaataaatgagtctgatgaccatcaatcattgttcatccacaatgaggaagacctgtcttcctttcttagcacattgtctcttcacactttaactaaattgggtcacttttcacaaaaatgaaaggagaaaagtgttggctaaataaacaatctacagcatctggcaaaggcagttcatgggcaattgacaaaacagcaaaccagaatggctgataaacaaatgaaagttgtgaacttcactagtagttggaagaatataatttaagagagagaggggtcaccatacaaccagcatactgaagcattctaaatcatctaataacaccaacttattggggttttatgaagcccatctctgcttgcctgtcttacaagcctctgaaattcaatgtgttcaaaagcgaaccacttcctccaaaccctttcttcttctcaatccagtaaatgctaccaccaagaactcaagggaaagacttgagtcatccttacaactgtcatagcctcaaccctcttatccagtcatcctgacaatatctgtaaaccctctgggtctgactccacacctctagaatccatctccactgcctgggagatgtcatcatcatttcctgcatggataacctttacatccacttaaccagtctttcttcctccttatctcactgcctgccaaccattattcagtgagcagtgcgactgactcttccacaattaaaaacattctatagtctttgctataaagatcaagttgaaatcccaaatgggatggcccttaacaattcgcctgttcctcttacagcctcatctacagtttcccctgtatttcccattcttactgtgttacttttccctaagtataatacactcattagagttatttcagtgaggatctagtagcagtaaattcatctaatatttgtttgaaatcttctcttattttgctttcattctggaatgattgtttattccaggataatggttatttaagcaacaggagtttaatggcctccttctaacttttgtctgagattatcctcacttattaaacaaagtctacttcacaaaagagattcactactctaattaccttctttcctttgtttatttctgaccacaatgatgctcctgcaagaaacccagcaatggggacaacactcatgtctatccagctttgcagggtaatgcaagctcaaaaatattcatgtaccatgtcatcatttaaggcaaagtcagactgttatgcttagcttcctatgatttaaaaaaaatctgtaagtgataaatgtttgagatgatggatatgccacttactctgatctgattacatacagtatatatatcaaaacatcactatgtaccccatgaatatgcataatttattatttgtcaatttaaaaataaaattttaaaaactgtaagttaaatcatgattttaaactttctattttagtcctacatgtaaaagccagacatgagactcaatgttcagaacactgagactaacttattttgtaaaatagatcatttcctatcagctggcaagtttagataaatgcatgttattaattagattacttgtaccctcacattggcataaatgagtaacatgtattcatttctaaaacactaatatttgtgtttacacaaatattacaccaaaaatatgtgtttacacaaatattacaccaaaaatatttgtgtaatacatttattgatttatagcaaagatacaggttaaagttgttttgagttttattgcatcacaaaactattaagttaatgctcagaagagaaagacatgttttgagaaaatagaaaagattccaggagtctattggccaaaaggaaaacatgccaaggagtgacatacacatacagccacatgcctctaagagtgtgtgatatggtttgactgtgtccccacccaaatctcatcttgaaatgtagttcccataatccccacgtcatgggagggacccagtgggaggtaattgaatcatgggggcagttactcccatgttgttctcatgatagtgagtgatggttttataaggggcttccccagtcacctggttctcactcttctccttactgcggcaatgtgaagaaagacctgtttgcttccccttctgccatgattataagtttcctgaggcctccccagccatgctgaactctgagttaattaaacctctttgcgttataaataacccagtcttgggtacatctttattagcaatgtgagaatggactaatacagtgtatgaatttatatcaagtttcctcgagtgaggtagacatacttattttgtgcaagggatatatttgacctaaacatgcataaaacatagatattcacttttaaaccaccaaaaaatattactaattcctcctccttaattggcatttcttttgttattcatatatggaatctaaatctaccatataacccttggcataaattcagtcatatatttgatctcttgaaattcgaatgtgtgtaagaattgtctcaatgtaaaaatgtaagttatttgtaagaactgtctcaatgtaaaaaggctgtaagttatttggtggcaaggacaatgattttcgttgttgttatttgtcattcttttctaattaatagatttgagttccccaaatgccacacttcattttaccaccaggcctttgcatgcagtgtttcccctgcctgaagcagacagttcctgcctctcattctccaagaaattgaacttcaaatatggtaaaaggatattatgagaaactctataccaataaatgtaacgatttaggtgaaataaacacattccttcacaatcacatcttaccaaaactgacacacgaagaaagagaaaatataaacagctccatatttatcttggaaattgaatctgtcaatataaatataaataaaaatataaattttcccacaaagaaaacttcaggttcaaatgacttcacctgtgagctttttcttaatataaagaagaaataatgtcaatattacaagaaccctctagagataagacaaaattcagcttaacctggacactaaaatctgcaagagcattacaagatgaggaattataacaaaattcatttcttagattacaaaattctgagcaaattatttgcaaactgaatctagtaatgtatagaaaaggaaatcacattatgataaatttgaatttatcctaggaatgcaaagttggaataatattagaagatcaattaatatgattaaccacatcaacagattaaagataaaataatcatatagtaaaggtaaatatatatatatatatatatatagagagagagagagagagagagagagagagagagagagagagagagtccttccaatagatgcagaaaaacaattagataaaattcaatgttcattcactttaaaaaaaaaaaaaagacttttaaccaactgggaatagaaagggcccttctgaacctatttaaaaaactatagtaaatatagtacttcatggtaaaacattgaaagattttcttgggaaatcaggaaaaagattcaggtgcattattacttctgtcaacattatagcagatattccagcaagtgacagaaaaagtgcaaagaaaataaataaaaattattatcaaaaaaaacacaacttttattattcccaggttgtatgttatgtatgatttaagcatctacattcatgagtaaatttgggatggaactttcctttctcattcttgttagatctaatatcaagtttataatagctaactttttcaattctatggaatagtttatgtctatattaaccatgtctctcattttctgtgtcctgatgttttgacatctgaggctttgctaagcctggagggactgctcctcccccaatttgtctattcctagagatagtaaacaaggcatccatgagattgcctttcagatgcaaaccaacgaatcgagagcccataacccccaaccactgctgccttggctgggctctcacgctctaggccactatccatctcccctgatcaccccatagctaagcaccaaacaagtagggaagcccctgtgcttcagagcccactgaaattattcaaacttgccacttctaaacctgttcaccctgcctcacccattactttttacagaagccacaaaaggttcttgctgaagtttctccctcttcctctgcctcctgaccaacccctgtgctttcctgtgtggcccacaacagtgtggcatgaccccttctcttgagatctgtgagtaataaagtatctgttcaatggcagtcacctcctaacctgttgaccttgccatacctaaataataataaaaactctatctcaagacaatgtaaaattaaaattatttgtagaacttacctataagttctacaaataacctgaagattttctgcataagaagatttttcatatccgctttttatgtttttagaattatttataattaagtattatttctttctaagacaatagtaagtgatattgttctagtgatatgctgctttagctgccttcctcaagttttatgatggagtatttttgttttctaaatactttaattttccagcattttctttgtttcattttctaaccctttgattttgtaaacatttttttaatttccataattattcctttacactctcgtctgaagaaatctcatccaacaccctgattttaaacaccaactaaaggccaatgatccctaatttcacaccctcagctcctgagctctagatatgtaaatcaaacatcctacttaatatttgcatccaaatgcctaataagtattcacagacttcatggcaagcaacatgcctgatttctattcagaaggtcctttccctcaggctacttctttccaatcacccatttgtcaaaaatgtggagccataatcaatttttcctttctccttcatccttacaacttacaactcacaagtcctgtcacctccagccctacagcatctccctggcctgttcaccctccttccccctccactgtggtcatcctggtctaaacacctgtcacctcttaccaacatacctgccttgcctcccagctagagtccctgcctctccctttaccacacaccactcattctccccacagtgggtagaatcatccagaccctatctctgtcctgtttaaaacctccaagtgtagcccatcaaacccctttaccaacacccattagaactggcccttgtctccctcaccttgcatgatttttctctttgtttttagacttcagccacactgtccttttcattttaatacaaatcctttagggccttttatgcccaaatttctcttggcccagaaggttcttgaccaaacatttttcctttatctgtatctcagataggtcttccctggtcattcagtctaaaatgaactcctttcctgcagtccccaattgttttagagatgggtatattgccaacactggccttgaactcctgggctcaagcaatcctcatgcctcagcctccaaagtagctgggatgacaggcatgggccactgcacctgacctgcatctccttttttcattacatcactgtttattttatattttttctattgtacttattgcaaccccaaattatcttatgtctttttgttgtactttcctataacctgtttccataagagccaaaagtcttgactaatttttcactgctttagcttaggatgatacctggcacacaatagatgctcactataatggcttgaatgaagaattaataaatggacatgagaatatactcatgacgggccgtgacaggtgtttgagaaaatagtttgagaccatgtgctgcagagcctgtgttggttaagggatggtgagaaacaggtgggtgcctaagtactcaacgaaagagtcaggtaggaaggaacatggacactgtcattacctttgacttctccagcctttgagctaagattccttgtcaggctgaaggcttgcagtgcagttgcctcttgtttgaaatttagtcaccagtactgtgagactcaaataagcagtggggaatattgtaataagtgactattctaaactctagggaaatccaaaaacagaattcaagtcttccttaaaagaaaagaggacatcttaggaaatgaggtctttaagataaatatcactaagcatcaatttgggcattatccgaattctgacatcacaagtgaaaacaacttcaactccacttaaagagatgtcagattcaggcagttttacaacaggaaatggaaaaaggttaaggctttaacttgattcagatgtcatttgatatatatacataggaaattaggtcactgaaaataattttttcaatcgagaaatttacagcccagaataaaatgatgttttaatccattttagccagtgttccttatcatttagctggtgatgtgttatcctgcactgactacttaaaagctacaaacaatggaaaattcgaaaaatatcgctatgcttgtttctgctactagcattttaatgacagtaaatttaagctattgagcacagctattttcttgaaaaaaaaaatggtgactgccatccattaagacgtgtgtgaccaagactttgagaccagcctgcgcaacatagcaagaccccatctctacaaaaaaataaaaataaaaattagctgggcatggtggcacatgcctgtagtcccagctacttgggaggctgaatcaggagaattgcctgaggccaggagttcgaggctgcagtgagctatgatcacaccactgcattccagcctgggtgacagagcaagattctgtctataaaaaataaagacttcatgggtgactacagtaatgcaggaaatattcattaatgtcaaagtcactcagtttacgaagcaaactacctctggggaagcaagccaaaaaagtgtggatgaaaccctatatctacgcaagcaatcaagatccaactcaaatatcaccttctatgtgaacacttgctactcctcttaagaaggattatcattcctccctgtttatcaatgtataaatctctattcttatacacacttcattagataataaatcagtctcccacactcaactgtcagcttcttaaaaacagaaaaccttttttaatcaactttgaatccccagctcccaatagtgtcaagcattcaagaaagatttactgaaaaagcaaagtaaacacgtatttaagtgaggatctcctatataacaagtgttgatcattgtctcattagtaataatttttttaatccaatctattcctgcccttaaataccttatgctctggttctgggttctaaaggggagggggcctgctttccatttataaccctgccttcacccacctcactttgtcaggagcataatagcaacctgcctgtattttctctggcacaagttgcttatattccaagtcaacacacacagtcctaataataaagaacaaggaattgtgtcacatcgtctcaaaacttgactactcctaaagtccttttaaaattaaagaaaatgtccatgaaattccaaaccgttttctaacccaagaatctgattcaagtaatgctaaagaacaggcttgcaacattttttaaagaaaggaaaattttaaatatagcatgtgcaagtcactatactaatttacttaggaaatatgtctagtaaagagtggcttctagcataacttatacatttaatatgtccagctataaatcaaaaccactcaccacagagtttttctatagaaattgtcccactccccattaattttgctgaccggaatttcagtggaagattaagcagttaatttttcaagtagtagcacaagctctcttttctcttaatggaagatggtgagagaaaagtgttttccacatttctggcctatatgtggagaagaaacagtctggttttaccaggttgcaaaaataatgctcctatttggataggttttctttatttaccatatccatctgtagaagttgagaattttcttattcaagggaattataaaatatatattttacatgtattttatttatgggaatacatagaaataaatacatattttatatgtattttgtttattatgtatttatatatggggaaaatctgctatactagagatatgtaagtcatgccatcttaattgtgagatatagttgtgatttgaaatattatgttccattttccccacaagaatactcagacctatcacacattgagttttggtatttgctttggataataaggaccctgtaatgatcacactgtgtcacccaaagtgacatacaataaatgggtgttacaacacaaccttcctcttgggagttagttctgttctttaactctgattttataagcagcctcactctactttaactcttttaaaaagctacttaaccaggtatttcccaccaggcagtcttaaagattattgtgagcttgcctacaatataaaattctgtggtagtgttgatagatatttcctaatcccaataatcagcaagtgcctcttaaataccttatgctaaatattatgtcttgtattaatattaatgccaatttttctaaattgttttcctaaatcatgtgacaagcattccaaaaaggatgtcttgcagaaagagaacacagaagtacagcttacaaagaaaataaagaaatacgtagattctgctttcaatttattcaaaatatactgttctttccagttaaagaagaaaatgattacatattccgttatcttgaaataattaaaaggtcatcaattttctgtcacagatgtgatatggtttaattacattctataaatgtattgaccaggccatcaggggaggccgtcttgctgagaggttattatcttaacaacaaagtgatgtccattgagtgggctagaagtatgtatatagagatttgtgtacatgtgtggattcaaaaatgactgaaaaactgggaatgaccgagttggctggaaccaaagacagcatgagatttactcatgttttcctaagataaaataaaatatttattcatagaaatacagaatttgcttacattaataaatttttccctgtgcaagaacttttatccatatcagactaactattgaaactgagcaaagaaaatggcagacaaaaatgcaattaaatagagcatctctcaaagtaatcacattttcaatttcccctattctattttaaaacagttagaagaaacaagtctccacatggattggaaagctaaaggattcgtgctggtatcacccaatcatgtgtctcccccagctaggaaagccctacatacgaagtcgcttggaaaaaacagaaatggtagcttccgccatgcctctacttactccaggattccatccaataagctctactgcaaaaaagacggtggactacaaagtccatgcatcctacgttaggccagcacccacaatggctgctccctgaagctgcacgaatgcaggtatatagttccacttatgtgttgcaagcttcttcctcttgcttatctgatcttatctgatcccagcagattccagcttctgcacacagccatagtgattcccatagtctagggtggcacccatattagagtatattttgaaagctcctagggattattctaaagtgcaataaggttgaaaaccatagcattccatgctgctgactccagcctttccggaatccttatatgcctctccctaagtgagcccctctccaagtgtattttgtttgttccctagtttgcatatcctgctttctgcaacacctttcaaggctgagactgatctttaaatcactacaaacttagcccagccttttgcagaccgtcaatatcctgataaataaataaaggggtaagatgttgaataaatggctccacattactagtcttctgttttctattcagaaaagtgaatatattctcctcctacccacaaagatattggaaaagtaaattgcgtttaaggaacgcattttttcaaacaaatgtatgccatatagagcaatagtattgttaacttctaagaaggtatgttcactttcatgtgatcgaataggaaagctgcagataggatgtttagtaaaaacttttatcaatttactcattcaagcctctctcatgaactcattccttttcaatgtatggctttcagccatcatcctggaagtaacttctataaagtagaattggctgtagcgattttgaattcctctcacagagacagataaatgatgagctaaatttcatttcacttatgaatgagactggaacgtgaagatgtgcacccagagggtcacataaaagattatgtgagaagtcagtcctgctcctagatcctgagctggatcaaactctgaagagcaaaacaaaatcagaaggcactgttgatactaactcagcagccaagtcttgaagacgcaaaacccagactgccccaaaagagagaatactgtataccgtgcttgaagggtactctggctaaccatgctattgccattgggatatggaaaatagcagtattcccttccaattgcagctgtaacaaatgaccacaaatttagtggcaaaaaaaaaaaaaaaaaaaaaacccagaacataaacatcccagagattaattcccttacagtcctagagatcagaagcccaatgtaagtctcaggtagctcacattgagatgtcagcagagctgcctctttctgaaagatccaggggagaattcgttccttgcttctgccagcaactgagggcagcaggcagtcctgagctcctggccacatggctccaatctctgcctccatggtcacacggccttctcctctcttggagtcaagtcttcctttgcctcccccttgcaaggacctttaggattgcattcagggcccgccccgataatccaggataatttctccttctcaagatccttagcttaatcacatctgcaaaatcccaagtccctattgccatgcaaggtaatatacatgggttctcgagattaggtgtagacatctttgacggccattattcagccaattacagacacatcatcagataaaaataaggtgtgccaaaaataactataatacaaggctggaagtaaagatgttctaagagaagtacagatggaaccacgtggaagtgagagagaggatgagtctttcccaccaagaagggtcagggaaagctctgagggctacaggacatcatctggttttgagagactggaagaattcagaaagattaaaactcaaaacattaagtaaaaaaatcgatagtcaatactcacccctcccatgaggcacacacatccaaaataaaacaaaacagctttttaaaaaagaatgatgttgggagaattgtggacttgtcagccggtaaccaacggtgcaaattgatagtaagtaagatgctctaattctggaatcaacagaacaaaataatcaagaaataaggtatcttataaataaaaaataaatataatggatggtttttattttatttttaagaaatatttcaaacgaatgaaaaaggggtaaaccatttcataaacagccttggagtgggcaactgattagtgtgtgtgtgtgtgtgtgtgtgtgtgtgtgtgtgtgtgtatatgcgtgtgtgtgtatatatatacacacacatacgcatatgtatgtatatatacacacacacacgcatatgtatgtatatatacacacacatacgcatatgtatgtatatatacacatacatacgcatatgtatgtatatatacacatacatacgcatatgtatgtatatatacacatacatatatatacacatacatatatatgtatatatgtgtgtatacatatatgtatgtgtgtacatatatgtatatatatgtgtgtgtacacatatgtatatatgtgtgtatatatacacacacatacacacacacatatatgcacacatacatatatttagattagaatcaatcaacaaaattagttccaagggaatttaaaaattaaatgtgaaacatcaacatataagaaatcaagaaaaaatagatatgtttaccatcactggaggaggtacaatttattaaacttagaataaaaacattaacatatttaactgtgttataaatgtaagcttctgttcttccaaaaataaatagaagcaaattaaaaggcattttatttggggggaaatagaggagatattacatagacaaagtactaatattcttaaaaagcttaatcagattgagttttaaaatactgaagcctcaatagataaactggcaaaggatgtgaataggcaatttccaaaaaggaaactctaaacaatcagcaaatgtgtggaaaacactttccttcaccagcaatcaaagaatgacacattaaaataaaaatgaagtaacatttgacctctatcaaattaaccagatatttttttagaaagatcatgatcaccgccactgctgagggcactgtgaaagggtactctacaatattgctaatattttgatataatccttttggaaagcaatttggcaaagagccttacgatgtttattttctccaatgcagtacttacacttttgagaatggagcccaaaataatcctgactattgagaggcattatttttaatagcaaaaaaattcagaagtaatctaaatcccagacaaaaaagtaatagctacacaaatcccatatgttcactccattggttattatttaactttttaaaaattatatttagaaagaatgtgcaaatatggaaaatatatgtcaatgttaaaaagcaagaaaaaatattgtattcataatatttctacttagattttttgtaaaataaatattagaagcacatataagaaaatactgtgttatgtctgtctctagatagtgaaaccatgaatgattatataaatgttacatatgctttttaaattctcattttttaattcaaaggctttcttatccttttgttgtcattgtcaaatgcttacagtatgttacataaagctttatctaaaactaaattttttaaatgaccaaaattaaagtttttccttccataagatgttcaagaaataattttttatttcttttttgtaaataataactgggttttgtatttacttttttgttgctggtatctaataatgcaagaattatagatttgagatttctctcaagagaaaatccagacctctttccttctaagaaaattgttatctgctacagcattttaaatctgcattgattatatcacagccatcataaagtgtttctacttgctcataatagcccccataaactttaagtttcaaataagaaatgatgtggttttgtaaaaaatctaatcatgctttttggcagatgtgtatctcgagataaatgctaagttgatttcacgatttttaaaacactccccaatattaatatcatctatgagtataatcttattagcaattagcttttaaactgtttgttctttgaaggtaacatttgcaaatcatttgaagaaattcatcaaatgactccccactgttggatttggcaaaaatggagtttaaagttgagggaaggggcaaggaatgcaggatctagggatctcgccaatttgggaaccaaaaaccaaaagagaaattcaagaaggaggtgccaaggcatatcctgagtcctggatcctgaatcagggagccagttggtgttgagaacccaatggagcattctgtcctggaaaccagacatggaatacagctgagaatgaggtttgcttgggggattttaagaaaaggaacacacttttgttccctggtgatgtccagtcctgcaccctctcccttctgctgggcaagagccaccccgattgtatcttctaaaagagtgctgtgcagcgaaactttccatcatggtgggaatgatctatatctgtgctgtccaatgaggagccccgagccacctgtggctcaacttggaacatggcttgtgcaactgagaaactgaattgaaggccgtcttggccactgaaggagccccattcccacagagcaggaaggctgccctggtcaaacatgctattgcctttaggatgcaggggagcctttgaatagcttctttcagttctcttgcctggtttctagctgtgctggatcggggggaggctgtggcctcctgatcactatgacatcctaaacaacattaccaggctttacctcaccacaaacacctcaacattctagaagagcaatgaccaccagtgctggaaccaatagccatatgtagctatttaactttaaatttaaataaattaaatttaaataaaattaaaaattcaatttctcagttgcacaagccatatttcaagttgagccacaggtggctcggggctccgcattggacagcacagatacagaccatttccgccataatggaatgtttccctgcacagcactcttgtagaaggtacctggtctagcagatgctgagtgggcctagttttctccttttctaagacacagaaacatagagggtctgacttaaagaacccccacggaagaggcctaagtgctgttagcatttaattaattaattaaaatttgccttcagcctcctgtaagacagaccccctgactgtggtcagcagtcgcacgcagactttgtcattttgcttactgaccacacattctcatggatcaattctaaattggattattgttagttttaaaagcgcctgagcagcagaaagcagccacgatggcaggccaaggggagattgatagcagaataaacagggaaagtgacaagatccgaggctgaattgatcactgtcagcgcgtccgtggtcagctgtctgccctttagtgcccaaagtaaacatcagaataatgtttagacaaacacatttgatttttgaggtaatgggtatgtcaactaatgacaaaccttagaaaggccaaagggatatccatttttcagactttttcaaccattaatcgttgattttggtagcagtgcacttctaggcagagcatagagggaactctggcgtgggtggggaccaggacaaacctccctaggattcacctgaccatcaacattttcctctataataaaattttgttggaagcagagagttcattctttaaaaatggaagcttcactggatgcagaatttcagttgtctaaagaaaatctgcaacaatcttctcaatccttcaaagggacatggtccattagcacccactagaattacatggaccttgcctgttaccaaaaacaaaacaaagcatggaaaattgctttatcagcagcagtttaccattgaggaacttatgctactgttccaaaaataagatatcgttggtgaatcacgggtacccaaaattacaatttgggtacaatttatcattggcggggtcatttttaatgcgatttttttttctttacactaccatccattaactgtgacttgggaggccaatcaggattgatggcaactatactgagagctccaaaattaacatggtttttctgatcgtgtaaggcatttttcttttgcccgcagagatgtggcagatgaaaccagacgggaatggaatgtggtctagaaatcggcttgcctctagaaggagctgagtagtacaactctgcttcccacagaatatcatggtgtgcgggcatttgctttgttcatatcataatcaatcaatctgtttaaataatgccacttagcaaaatgctgggactctctaaagttcctcaagcacagaaatgcaccctggaagtcagagaaatgtgaagaatgtatttgggttgtacctgtaaaacatgtgtagcatgtacacccctcagagaaaatagcatgatgggagagaaagcacaaaaacatatggacggctgtttccttagctgtgtacaatcccagcaaacttactgcggaaggtgggtacgtaggaaataagtgtacatttgaatacatttgcagggtgggtggtgtcggctcaggctgccataacaaaacaccctagactgcatggcgtaaacaacagacagttattttctcagttttggaggctgaaagtccaagattgaggtgccagcactgctgagtttgagttctagtgagggctgtcttcctagcttgtaaacagatatttacttgacgtaggggaaaggagagagtgagatctctctaaagtctcctcttctaaaggcactaattccatcatgaagcccccaccttcatgacctcaatctaaacctttgactttccaaagaccccatctccaaataccatcacattgggagtcaggtcttcagcacatgaattgacagtcagagggacacagttcggcccatattgggaggcacgtggttatcagtttttggaggtggttgttactgatgttcaccaatttccagttcttgtctatttctggtgaagtgctggttacatgtcttcactcccttgaaattcagcttggctatgtgattagtcatggttcatgaaatatgaggtgtgtcacttttggcatttcatgactgttactcagctctcctcccatgtcttcccctgttagcaagccccaaagccccttggggaggtcatgatgtcataaaatgacaatctagttactattgcttcaaaagaactaaatggcgtaaaataatcattgacttatgctcatggaagatggggatctgtagataaatcagggtctgtgagtcctgagtcagcagtagaatatgctgcaattaaaaacttgatgtaagaatattatttggccaaaaagaaaaggaaggtgtactgatccatgccacagcatggatgaatgttgagaacattatgctaagtgaaagaagacaggcccagaaggtcacatattgtatgattctgtttatatgaaataaccagaatagacaaacctatagagacagaaaacagattagggattgccagaagatggagggatggggaacaggaaatgattgattaaaaaatatggggtttctgtttgggatgatgaaaaagttctggaactacatagtggtgattattccacattatacatggacttaatgttactgaattttatatgctacaatggttaaaatggtaaattttacctcaaaaataaaactaatacgatatccaaacatattacagaaaaatagcatacaaaatcaaagaactaacttcctccttacactcagaatttaaggcccttactggattactgggtggagtgtggatctgtcatattaaaaatgactgactgagaaattaaagagcaatagaaataataagaagcctagaaagagatgctgtgccaaaaagtgactagatgtagagtgattaacactggacaagatgcagcaataatattcaaggataggagggtttatctaagattgtttgacctacccatagaggttctattaggataatgacaaaatagtgtttctgcataattccctaccataattcatttaggcaaaaaagtcctatcccagaaccactggggtgcttaatgccaacttttaataaacttggtagatagaaatccattttcattatcttcccaaatttcaatgtgtggtgaaatttgaatctttgtgcaatatcttccccacaaatagggaaagctgacggttttgccatttagaagacagagcatgaattggtgcctatcggagaaggaaggtaaaagatgcctttatctaagtagatggcttatgttatgatgatgtccattccagttactattactgcaaaaaaaactgaacggcataaaataaccattgacttatgctcacagaaaacagggacctactatggcaggttgtcagccagaaccaatgagcagagtggcagctgcgacctgagaggtaattctctgaatgagaaaagccctttatttgggaggaaaactacattgataaggtcaactaacaagctacagccagaatgcatagctaagatgacccagagagtaagggaaaggcccagacaggtacagtcaggctcacttcctagttaaagttgatatttagcatcctaagaatgtattttgtttaggtgtttctaaggtagtcattttgaaattcgtagactagcaggcagtaataatttcataaaccaaactgcccaaatccaatgatgaatatctcatgcacagtggcagcatctcggagtgagggcagacttggaggaaggactggaaaaattccatctggaccactagccttaagcataaaaatataataaatgattcggaaatgactttcacagatagacacatgttgccctatgagcgtcttcaggaatcttcttcagagagggcttattgtacaccatgggttagaattgcaaatcagcatctaaagagggagaaaggggtaaatttaaaaagcagatttccacagagagacacaaaggaagtcaaacaacagggagaaagaaacaaaaatgggaagcgagaaagtgggatcaaaggagggatcaaaggagatgaaaacgagaaagatgccaagagagaaagactcacttcatcctttgaaatgttctgctgcccaatggagtaatgggagattctgtcataggtggacacctaagaggaaaggagggaggacgtggttgccttttcattttgtcctgccccttggcttgttctttctgatccaacacagcggagtctgcttgttcattggccaaatgtcaacaagtcaccataaagggctgccaaggaaaatgaccaggaacacacagcatgcctgagtcactcatctaatctgccccattgatataaattgcacaaaaggacactctgtcatcatgaaaggagaaagatgtgtacttggattatcttgagcttgacccacttaccaaggacttgggaaaccaggagaccagccaagtctccatctcccccagccccagggtgtatcatttatacctccatccactcacctatatctgaatgtccaaatattctgcaaacctttataaataatagaactgtgtggaatgcagtttatactctcaagaagagaggaggtatttttgttgttgttgttgttgtttgtttgtttggctgtttccacgtgttttcaggtctgcaacactcttcagaacaaaatcagtactttctctataatgtgactaggaacctgtcttttccccaggtctcctgcaaaatttctagcaccttcctcacacaagttgcaggaagcatagagctttgaaattataatgatggaaaaggaaatggaaagaaaggcccaacttttagtcttctgggactccagatcatatttatgcgttcaaaatagtaactttctcctagaaaagggggatgtgccaccattctacacactgggtggaccatttcctagctggtgctgcatttgctacaagcccacagggccctggcagaaaccccctctgatttctaccactgtcctttttaaatgcagcaacagccaaaatctacactctccctgcattgcatctgtttcatttgcatcccaggtttctgcaataaagcaaacccccaatttattaatttttttgaaaagataacgtaagtctaagaaggttaccaagtgtcttcagctaaccaaaaatttaaagaccagcaaggatttagaattccctatactagacccctgatcagtaatcaggtggcgtattgtttgtttgtccatttgtttgtttgttttccaggcatattatgatgtgaggttctttagctacatatgtgcatctccttaagtggtctcagtgatttccagttttgcaggatatacctggagctagaatgatgcaaacaaaaattttagatttaaaaaaatattttaaatataaaaaattaaaaataaaccctaaattcagaattttccaagagctaaatgctctgagggccagtcccagctactttccagctgtgtgagctgaggccagttacctaaatttcccgtgcatcagtttcctgcattgacaaacctctggtaaggatttctgccctacatagctcacaataccaaaatgagaaaatgggaaagtgctaagaattataaagcattcaaatatgaggtcttatgactgctaacacagacttctgcccacaataatcactagaagacgtacgggttatgtatgttcaagtcacctataaagtaacaaatcagcaacttcctatccaatccactacatagcttcctcccataacctaaccatgtgtgtgctaatagcctacctacaaatggatttctctctatgacattcaacacccattaatatttatgcagctgtgtccaggttaaaaaataagtcaagccaaggtaagaggcattttttaaaaaattattttataagttaaacagtaaaattgacttttttcccttttggtgtagagttctatatattttaacacagctgtaggttggtataaccaccaccacaatcaggatacagaacagttccatcaccctaaaaaaattccctatgactcttcctttatagttccactctttcccctgccccagctccaaaaaccattgatctgttctctagatctattctgatattttcaaaataggtcagataaattgaattatacagtatacagccttttgaacctgcctttttccattcagcataatgcctttgaaaatcatccaagttatcacatgtatcatctgttcttgtttattgctgaatagtattccatggtatggatataccagtttgtttaatcattcaattgttgaaggacatctggtttatttctagatcttggtaattttaaacacaacagctataaacatttatgtatcagttgttgtgtcatcataagttttcgttactccaggataaaccccaagagtgggattgctattaaacagtgacttgtaaatatcaacatcacattaaacatccagattttattcaagtcatcctcataatataagagactgatatcactattaatcaatgctcaaaaactaatatgccctaacccctttgaaaatttgagttgtttcatctacagccataccactctgaacacaccccatctcatctgaaaatttgagttgttttgatatattttgtggtatttgatttttttgtggtattactattttgcataaatgttaatgaaaaatatcattttaacaattgtaaaaacattgcagtgatgctttcaagagttcttcctattgacttagaaatactcattcaatttcccaaaataaagtaaaatttaaaatctaagtagaaaggaaccaccacatcagagtctgagttaacacaaacttgctctggcataattgaaaaatcactatgctaaactttgtaaagaatacaccaccattcccccaccccccatgaagtacaccctagagtgtttgaagattatattatgagtggcccaaatgcctgtgtttggcatttgttaaacaatcctagaggagctgccatccttggggttctgtgggttcatccatggctgacacctctcatcctgaatcccttgggtctcacaggccctggaacaatctatattctcccggttgaagatgacagcatgtcagtgtacttaaaattcaatttcattcttcctaatctatgcaccattatgcaggtctttgaaatagtctccaaagaaggtaagtctatattgattccattcccttacatagcaactggtgtgtagcaacccatagtataatatgagggggagaaaatattgattctgggaaacttaatattattaaaagacagttgtattaaatctctttcctggatttagctgagcactttttttttcatttttccattttcaaaaaaatcaatgaagctaatactcttgttagttttagagtttctacgacagcagtttcatgtcaccatagaacctacgggaggtttgtaggctcagcactcaaggcttggagtcctctgctgactgatgagcataacatttctctcttcagttattccggccactcagagcgggcaagtagtatttaaattttattttccatggtatctgttttccttggtgtgtaaaagtctcaagatatggcttagccttagttataaacgcctaagtgcatgtgatgaagctcattacacacatgcaattttcagtttgagagaagtctaaagaaataaaatcaacgtggggtggggggaggtttttttgatggaaaacacctgccagttgaaaatcccagaatctgctatttaagattgtaagtcacattttcttttttgaggaccatccaaacttgaggtatttttttctttctttcttttttttttaacaaaaaaaggaacagctgcttctgatttgtgacaagattaaagcattttggaatctctctccagatatctaatttctgatagaatgtctgttgtgtcattatcaaatataacaagactgtaacatggctccagagtcaatgaaccaaacactggaatcttcttctaattatataatataaaactacttataattctgatgccatgaatttggaattcatgattaagatgggttaggcttttgctaagcaagtgttttcttcatagatactgcaaaccatattttaaaaataagatggcaagaataatgctgaaaatatgtgaaaaacaaactatttccaaatccctgaaagaatctagaagccacaattagcatgaaaatatttgtggtgcttttaatggttattttatatctctgtctctggcttctctggagagtggtgctctcagctgccaggagaacaactaagaccacctggatattccagaccccataaatgcatatgctccagactggatttgatttttgtactcctgctaattgttcctgctgttttcccattttcccatcttcactgccatctacaagagaaattcaaaaagcgaccaaagatcgttggcttggtggacacagcttaggaaatttcagtctaatttgcctcctctcccctagaatccagcatgctgcctcctccttgctcgcctggaccatggcaacggcctcctgaagggcttccaaccagtatctcttccccaacctctgcaatcagagggagcctccagaaaaaaaaaaaaaggtgtcaaatgatatggaaaaccaccatgggcttgacaccgcctgttggataaaacagtcatcagcactgagtaccccagcgaggctttacatggagagatgaggaagaagagcccaggcaggcagcaaagaagaaatacctacgtcatacttgggtcatggtaagaagaccaaattggctcgaaaagggattttttataagtgatggttatagaagataacttcaaagaggtgaagggggtccagatcagtgaagacttgaaaggctcagcctgagactttctgactttatccctcatgccatggggagccatagaatgttcataagcagaagaggcagataaaagcacagtccagttggaatcaccaatcactcccccaatagcacacacaccattgaatgtcattaggctactaattatttttcctagtgaccacccccattgtctttcactaagaaaaaacaatttattgacaagtaattctttaggtgcttccctttcacacactttcaatttttaagtaacactttatactggcctaacaaacataaatgacattctagagatttacaatatattagtataatattagtgtacgatttaacgtgttggctctttctccagagatggaaaaaaagcataatacatcatcagattaaatattaacatattaatgaaaagacttcatttctctgaaccaaagaaaacgaaaacaatgatgaagaatgcattaatgagggttttaagcataaatgacagaaattttaatgccacttccaaatatgctaacttacttaaaattagaataaaatgtatcaatacttacagattatcagagtcaccttctatcctgaccagtatgtcacaagcccctaagctgaccagttgtcacttccaagatatctctaaagcagctcaaatttaccatggccaaagctgaatgcattattatcttccccaaatcttctcagtctccgttaagggagtaagtgtccacctgttcccctaagctagaaatgtcataatcctccctgtctcctttttctctccctaaacccctgcattggttccctaatactcatcacttttatctccaaaatgtctgtctgaatcaggctcactcagcattctcaccatcaatgccttaccatcaatcaacctcccaaaagatttcagttgcctcctaaacagtctcttaccaatactccaacagccagctggtctcttctaatctgaacattcctggaatcccctttccccctcctccaccggacaaacctctcttacccttccagcctgaactccaatgtcacttcccttgcattctcatcatctaccacttccttcccaaaagaatgaacagtttcctcctctacattccctctcctatgtgttctttcttgattacaacactcatcccatttctactatgactcaatgcttaagaatctgtgtccttggctgggcttggtggttcacacctgtaatcctagcactttaagaggccaaggcgggcggatcacaaggtcaggagttcgagaacagcctggccaacatggtgaaatcccatctctactaaaaatacaaaaattagccgggcatggtgccgggcacctataatcacagctactcgggaggctgaagcaggagagttgcttgaactcaggaggtggaggttgtggtgagccgagatcgcaccactgcactccagcctgggtgacagagcaagactccatcttgaaaacaaaaaacaaaaaacaaaaacaaaaaaaaaacaatctgtgtcctctgatacatttgtgcatttattggggttcaggaccgtgtgttattcttcttcgagtttctagcgagtgggggttcatgccaccctcaccacactctcctttgagtaaagtgatgcatctcatccaaaatgtcatcatttgcaatttaagcttttaaaattttcatagctgcacatcttgcctcatgtaaattacctttgcccaaccttcttttgtaggtgtttctatttggtcttcttaagaatggaccacttacatgcagaatttggtacaagattttacccctggctggatgcctaaatgacatacagaggaaagggcggatagggtaaaagatctatatgtacttcggcatgtacctcgatagcccacaacccaaccctggcattggcttctagagaaaacagctatgcagagagaaccacctgtgctcccaaagtagagactagaatgttctatgattgataatcatccgtgggcaaaagcaacagcatggcctctgaagcgatcactcctcatgccaagtaaacggctttctcagcccacacctgccctgaactagtcaattaccaacgttgagaaagcaggaaatgaatggctcatgattttaagcatcaataatttaaataaaaaactcataaagagtcatccttcttcctggagtgtaaatgaatgtgattctaagtgtatggtaaagacacaataattgccagcaaattaactcccaatgaagatgcagagggatatctgtctcctttgactcttggacaatttccttccaaagggattttattgtcccacattaggagtgagaactcaactcagtacaggccgtgcttctgtgttgaagaatgatcaccaggcagtcacataggagcagcttcagccagcgacactggtatccccacttggggctgacaaggttatgtactctgcaaccagtgttctgcaaatccagtcatgagttggtccagagttgtttttagataaagagaaggcagttcttctctcacccagatcctctctggcacactgacctttgagaataagaagtgtacatgttttaattctatgctcagcaatgtactgttgtatttagtcagaggctgcataagaataattttctagaactcaaactggtgtcagatctctgttaaattgcaggtggcttccccaccctttttgccttcatcatctctctctagtttgagagtcttctctaccctgaaattttcaccagtctgtttaacacaaagtaactttgtgagacaaccttgttaaaactaaggtattggaggtcctatgtgttatctcctccactggaggagatcgcttaaaaatcatttggaagtttcttttgctgtgcagaagctctttagtttaattagatcccatctgtcaattttggcttttgttgccattgctcttggtgttttagtcatgaagtctttgctgatgcctatgtcctgaatggtattgcctaggttttcttccagggtttttatggttttaggtcttacatgtaagtctttaatccatcttgaattaatttttgtataaggtgtaaggaaggggtgcagtttcagttttctgcatatggctagctagttttcccaacatcacttattaaatagggaatcctttccccgttgcttgtttttgtcaggtttgttaaagatcagatggttgtagatatgtggcgttatgtctgaggcttctgtccttttccatcagtctatctctctgttttggtaccagtaccatgatgttttggttactgcagccttgtagaatagtttgaagtcaagtagcgtgatgcctccagctttgttctttttgcttaggattgtcttcgctatataggctcttttttgattccattagggagttgaacgatgagaacacatggacacagggaggggaacatcacacaccagggcctgtcagtgggtggggggctaggggagagatagcattaggagaaatacctaatgtaggtgacaggttgatgggtgcagcaaaccaccatggcacgtgtatacctatgtaacaaacctgcacgttctgcacatgtatcccagaacctaaagtataattttaaaaatcatctggaaaggatttggtatgtacataccacaatttgtctatccatccataaactggtggacatgaaggactgacccatgggacaacgtaaatgagccttgaaaccatgacattaagtgaaaggagccagacacaaaagacgatgtgctgtatgattccatttatatgaaatgcccagaaaaggctaatccacagagatagatgcagattggttgctaccagggcttagagaaaggggaaatgagaagtgactgctcagtgactatgggatttccttttggggtgatgaaaatgttttggaactacaaaggatgatggtttcacaacattgtgattgtacttaatgccactgacttattcactttaaatgcttgactttaggttattcaaatttcacttcaattttaaaaggtgagggaagtgggggaatctatacttgaccaagtatgagtctctgatggtgaaatttcagaagtagtgggaatagaaaagaagtttcctattaagatgctttcacagggtctctaaatcgcaggtatgcctgcctccgatgtttcacctttgttggggcccttctggaaagcccagttagtgcaaagaaaccaagccaggttggcctcagcctttcattggatgtatccaccttgtgtgaagaaaaataaaaagattatataataagcaactaatgctaaccagtattattattattgtcaatattctatgctgaccttctactttctgtggcctaaaattagattgtgtattgtttatgaaactttcacttgggaatgttttttaggttacgtgggttttctgctgctgtggcagcagcaggaccaagccaaggcaaaaggcccagtgttactcacagttggctttatgatttcacccaaggacagggaccaaggcacgcagctgaaaaagcaacattggtttctggtctctgatgacacatgtgtttcttcttcctttctcatgctcccagcaaaacagagtcctacccagtgccttccccaaggagaccctggttgttgagactctagactacagcatctagaagtctgagacttgaaacccatctcactcaattcctgttgggtctctgatatgaacatcagcccttctcagggcaggaatttgacattgcgaaagggaaaaataaagaaatgagctttgggcatgtacagtttttctgtcctgctttttttaaatttgagaagaagtatgttcaacattgtctttctacaataaaaccagaaacatggcatatctctcagggtccagtcaggaggcagccatcactccagctattttaacaaggaaaatgtaacacaaataactgttaactattaaaggtggttaactactgatatagtctgtctgggtccccacccaaatcccatctcgaattatagctcccataatctccacaagtcataggaggaacccagtgagaggtaactgaatcatggggtgggtttttcttgtgctgttcttgtgatagtgaataagtctcatgagatctgatggttttataaatggcagttcccctgcacaagctctcttgcctgccaccacgtaagatgcaccttttcttctcctttaccttccgccatgattgtaaggcctccccagccatatggaattgtaagtccattaagcctctttttctttacaaattacccagtcttaggaatttctttttctttttttttcctgttttcttttttttttttgtgatggagtcttgctctgttgcccaggctggagtgcagtggcgcgatcttggctcactgcaacctccgcctctcgggttcaagtgactctcctgcctcagcttcccaaacagccaggattacaggcacccaccaccacacccggctaatttttgtatttttagtagagatggggtttcaccatcttggtcaggctggtcttgaactcctgaccttgtgatccacccaactcggcctcccaaagtgctggaattacaggtgtgagccactgcacccggccctcgggtatttctttatagcggtatgaaaagggactaatacaactactaaaaggaactttaaaaggaccttaaggaagcagcaaaagagcagctattacctctaggctgaaggacagtgaaaaattaaaggaaccaaggatgggcagagggaccttctacctccactgaggctgaggttcagatctcttcagagatttttgccaaatgttattcttgttcatgccaagcctgccttgtgggaatgaataagacagatcaccattcctgtcccttattactgatcagttagattgcatggcagaaaggtcagtatcctcggtgtctgcaaagtggttctttccccctgcatcgtgagggagggcaccacacaactgtaagagttgaactccaaggagaagactcttggtaaactcattattagagacttttatttaaaagtttttttgcttttttttttgccaaatatttttttgggccaacattttttcctaatttttatttgctgccacaggaactcacaaatggctggtggagaagctttctggaaagcaaaggcacggggtggtctgcagaagcaggccatctcttgttgtaggaggctgtgggcaggaaggagcttctgagaagtgaccagtgctggggagagcatggcctgaggcagagctggggctcaggtgcatgtgccaggtgctactgcattgaatgataataactagccaagtccagaactcagcagggatgttcctggcactacaccactctggcaccctctactgatgacgtttacattcacccagctggctaagaagaaatgtttacagggtccacttccagtatcacaaagcagagcagggaaggatgaatttgaagctgagagacaataaattgacacctgccatagatggggattgccattctccctctgatctcacttccagtgtaggtaaacccttcgcaccagtgagctgttatcagagtgtcttcatccatgaacggaacatggacagcctgcttcacccaactccagctgccagtactcaagggtatttccgggcaggtcaaagaacatcactaaactttctaaatcggtaacagaaatattttcacaatgtcttaggtagaggaaaaaagtcaaaaggaggacgttcgtaaagttaggcgtgctcccttgaactcagttttcttttcctcttgagcactcagacagactttctatcttcctttcacagttaaagtagaccgacatgactgggtctagccaacggaagataaacaaaaataatctatcccacttccaggtctgtcccctagaagacctctggcacgatccctcctgccttctcttttcctggacccaaacactgactgcagagaagatctcaggaaagagcagagcatctaggaaagcagcctgtttctgagtcaccacctggaggagggcctccctgaagagttgcccagctggaaatattctaattggattgtgaggagaggaagcaatagcccttcgtgccctggttctgaaaacgtgattcccagaccagtggcatgagcatcacctggaaacttgtcaaaaatgaaaattctcaggccccacctcagacttaaccagaaactctgggagtgaggggcccagcagttaggtgatttgggtgttctaaagttcaacagtcactgccttattgtgcaaaaacactaaatttggagggttttttccttaaggcacatagacaaccaatcacataaaactcaaactaaaccctcgtcataaaaaccttaaacaaagaacttaataaccacttaaaatgtgtctgcccagtaacagccctttcccaaggcagacctcctccttgcctgggcactagactgcctttgtgggactaacattagccacaagcttagaaattatggtttaggagtcatgcagctgcgggctaccagattctgactctccctaaattgctcctaagatcagtgcttcagatagtttgcagaccctgcacttgatggatcagctggccccacccagatcaataaactggttcatctgatcttgtggctcccactcagggactgactgagtgcaagaagacagctccaactccctatgatttcatcactgaccaatcagcactcctggctcactggcttccccccacccaccaagttattcttaaaaactctgctccctgaatgctcggggagactgatttgagtaataataaaactctggtctcccacaaaaataaataaataaataaataaataggctgggcacgatggctcacccctgtaatcccagcattttgggaggctgaggctggcggatcacttgaggtcaggagttcgagaccagcctgaccaacatggtgaaaccccatctctactaaaaaataccaaaaattagccgggcgtagtggcaggtacctgtaatcttagctacccgggagaccgagacaggagaatcacttgaacctggaaggcagaggttgcagtgagccgagagtgcgccattactccagcctgggcaacaagagcagaactccatctctaaataaataaataaataaataaacaaaatgtgtctgccacctcaccagggattgttgtcatagctccatcatccacaacacccctgaagagtccacacatccacaagacccctgaatagaccaggcagagacagcactggtgttgcagacttcatgcttttcgatgtttcactgttttactgcccatactacctatttcggatctgcacatttgttctaagcctgaatcaagctgattaggttgctataaggttgaaggtttattaacctcagatatcacctgtgacatttgactggaagccagaaaacaagggctgtgttcattaattgagctactttagacaagtgacttaacctgctcacttttattgctttctctgaaaagtcaaataatccccgacagacctgctttaaaatcacctgcaggaaaaaatctcaaaaaagaataagacaatagattgcatttccatatttagagatattccatatgatcgtttttacattcatcaaagtttaaacaacagaaaacaccaagtggttcctcttccactccttacaacagccgtatacaggagactttgaagaaacaaactaagtaaactcatattcaatgtagaactatccaaatgcaaagttttctacttcagttattgacttaaacataacgtcacctctagaaaagtgtgggttgtttaatttctcaaatataaagcccaaatttgaaaaattttctgacaaaaaaataatcatttaaggaaaataggaagaaataggagcatctgatgtcaaagggatatttttagtgagccacgtcggtaaaccagtcctgccaggaatgtggtgcttcaaaggagagtcctagcatttagctccagctccacacaaagccacatcttcagcacttagttcaggagtaattaccatctaactggcactggggtggaaggagaagagaactatattcatcttgtgattaaatggcaattagcaactaagtgccttgcaataatgtggcactcgcgacctcttcacagcagcttcccctgccaataccaccagccttctgggtatcaaagcccagtacatcagggctaggaccccagggaatcccaaggctgacctgcacaccagctaacataggttgggtggaggcacaaattagtggttaagagcatggactctatagccaagctgcctggattccaaacacagctccaccactagcagtctgccaacttggtcaaattacctaaacctttctgatcatcagtgtcatcatctgaaaactgggggaaatagttgtttctaagatgtagcttgattgtgaggcttaagtgagtcaaaaatgcagagcattggctgggcacggtggctcacgtctataatcccagcattttgggaggctgaggcaggcggatcacctgaggtcgggagttcgaaaccagcctgaccaacatggagaaaccccgtctctactaaaaatacaaagttagccaggcatggtgacgcatgcctgtaatcccagctactcgggagcctgaggcaggagagtcgcttgaacccaggaggcggaggttgtggtgagccaagatcgcgccattggactccagcctgggcgacaagagtgaaactccatctcaaaaaaaaaaaaaggcaaagcatttaagagagttcctaatacatggtgaagccccagtcaaaaaaggctaatgtttccctaggcttcagtagcttcccctccacaagcctgggatagattaactcttttctgccaatgcattgtttaatgttaaatataatatttaaatgtattatactgctccaaacaaaaactaaacaaaacaaacatcttttcagtcatgaatcctggttcatcctattcccaagggtccaccttcagctgttccaagttatgaaacaaatagaagcaagttttaggaagccctggacagtaactattgcccaagaataagcctgtggatctggaacagagattgagaagtcccacctctccagcagaagtaaatgtggatggaccaacgtcatgccaaagtgaagacacacgtgatcagctcttgatgatctacaacaaggtagcctcttaggctggcatctcctcttgtcaaagtgattgtgaatttgatgcacaaactatttccaaaattagttttaaaacataagtagaggataaatctgttgcaaaccatagcgcttctttaaggctattcctctgtagcagcaggtgtctatttgctctcccagttcttgcccgactttgctctgtgtcacagaaaccttcattccccacactccttgctctctggcttctaagtagttttggccaatagaaggcaatggtaagactggagagtcttacgctacatagaacaggacccccaacagtgcccacatctcctctgtgagctgagctcccaccagagagcccttcactctgggttctcaactccagccaggcagcccccactctggggcagggcgaccccacactgagcagtcccctagttttgatatctcatccttccattgttcctccagtccaagaggtggcagtagaatattcttattgtgaattactgattgcctcgtggttctctggtggtttctcagctcttacatcacctgtataaccaattccctttattaaattccctctgtttgaaaagcctaggttggatttttgtttcctgaagggttggggtctctgactaataagccattaattgtatttatgtgtcattctccctccatgatttcagtgttaaaagcactggagtaggagtcaggagtcctgagttctggtcccaggtctgcccctaattgactgtgtgaccataagcatgcttctctgtgcctcagtttcctgagctggctcaagcacattcacgggcaagccatttcacattaacagcagaatcaggacaaggtgatccaatctgttttgggggtgagggaagaactgcaggggggcttgggtcattgctgcgtatgtgtttgtatgtcttatatgagcttgtaatttcccagggaactcataggtacataatttcctctgtactcatgattttcaccctaatttttcacatttagaattaaaaagagtttagcacattaacattacaaaataaggactgctgaggctaatactatccctattaataccccaaccaaattagtataaaaacactggataataaacatgaaaatatggtaaattcagggcctcagaaagtagatttgtgttttctttctcttttctaaactagcagttccagtatgactagttatgggccacacaggagcatagccatgtaaaattcccagtgtgctatctgtaacctgatctttttaactttttctaataattaataattttgaataattattatgtgatattaatgtccataacagttgtactattagcctttcattgattttaacccagagttgcaatcagcacatactttttttttggagatgggagctcactctgttgcctaggctgttattgaactcatgggttcaagagatcctcttgcctcaggctcccaagtagctgagattatacatatgcaccatcatgcccagctgcaatcagtacatacttaagtcagttatcaattcatgccctttattgaaagaacatttaaacataagactatttttatatgcatgggtctcagacatcacacacacacacacacacacacacacacacacacacacacaaacatgcgctcaacttggaaaatatttctacaatgaaaactatcataaattctttcttctcaggccacatagtcctaaagttcacccaaaatattctattttcttttaactcctcactgcctcttaaaaaaattgatctcttttatcaaaagcaaaagccaatcctgaactattcacgtgtaccttccatgaccactatggtagcaccaaacacatgtagcgactgggtacttgcaatgtggctgctccaaatagcattgtgccagaaatgtaaaaaatacaccacagtttgcaccctcgatgtgaaaaaagcataaattatatcattaataattttatgttaattgcatattgaaagtataatattttggatatgctgggatatactgttaaaattaatttcatctgtctcttttactacaaaatttaaagttgcatcgcatcacatttctactggacagcactgattctacaagttaaggaaaggaaaaggcacttctaccattctctgcctttttacgagaatcttaatgaagaggagcagtattgatacactgatggggtgggggtgggggaatggcagaacttacaggaaagatggatgtgcctgagttttaacttgctgatacccaaatcaagctttggcctatagagaaaataacaaagacccaattaatagtgctgtacactggaaacattattgtgttaatagcgtgtgctgccttcaaatgtccaagacagaagagcttaaagcattttattcttattgactgaaggctgaaggaagtaaggacctcagaattaaagtttcagagaattgaattggccctttgctcccatatttgatgatcattcaaaaaagtgtacatgtaaaatatgtcttacaaatatacagaaggctaaagccttagtacattcagaggagaatatcatatatatattctacctcacatctaaataattccattcatcatctcaatccatgggcttggcatggaccctggtaacacagtgtgtacttaatgtttgtggaactgaactaaacgcacaacctaacaagctttacaattactgggactcgggatccagtcatgccgtttaaaacaaggaagcaaagacgcagctccagaaattcagaaatacagttgcagaaatttccaaaaacatgccaaagctggctgcgcacggtggcttacgcctgtaatcccagaactttgggaggccgagtcgggcggatcacgaggtcaggagatcgagaccatcttggctaacatggcaaaaacctgtctctattaaaaatacaaaaaattagccgggcatggtggtgggagcctgtagtcccagctactcaggaggctgaggcaggagaatggcaagaacctgggaggcggagcttgcagtgagcggagcttgcagtgagcagagatcgcggcacagaactctagcctgggtgacagagcaagactccgtctcaaaaaaaaaaaaaatgccaaagctattaaaaggatggaaagctgaatcaaacatatttggagagccacagagtgccaccatgcctttctaataactaattaggaccttggttttctgcagggtggtataataaccatttggctagtactttcagggggaaaacgtctcttcaccaccacagtctgtattcctttgcgttcttttgtctaggcattttacacttacaaatatatatatacacatatttaaagagtgtattcttttttccttgaatgaatcatgtgggcactagggtggacctccagggattttgggtggatgagaccaatacaggaattgctaatgtggtttctattgaatgtgatggattcgttaggtagaatcatttgctaaaccaggagtactacatttttactccattcatctttgtcttttggattccagggggtgactctgccgacagtgccactacgagctgaatgagcagccttgcttgaagaaggtggcttcaggaacaaatgttgatattccttgactcttgtgagctcctacatttcagccctggcccctcaccttgaagttactctgaagctacgcttcacacgtgtgctctcattttctcagagaattaaagggatgaactccaaggctttggaagtttcatcttctccctgtcacatagtatgtaacctggatgcaaccatcatggtctttaaaaatcccaggggctgttatttatcaggtgtactaagctgaatagcgacctccaaaaggatatgtttatttccaaacccctcaggacctgtgactgtggccttatttgagaaaagcatttttgcacataattaaggatttcaagatgagatcatcccggatttaggatgggccctaaatctaacgacgggtgtccttataggggaaagacagagggagttttgacactgctatggtttggatatggtttgtctccatggaaactcatgttgaaacttgattcccaatgtggcagtgttgggaggtggggcctagtgggcacatctgggtccccttcccacacaccaaattcccctttgacttccaccatgttatggtgaagctcaaaagccctcaccggaagctgaacagatgtcagagccattctttgaacttcacagcctgcagaaccatgagctaaattaaccttctttctttaaaagtttcccagtcttaggtattcagttaatagcaacacaaaatggattaaaaacagaagctcagttccttttcaagtaggaccagaaaagttgtctagtataattctaacatagcgctggaatccggttcccacctccatccctccaaatacacacacattcacgcacgctccttgtctgtacccatgaacctctagggagttcacctcctcctacaatggcatccacctatgggctcccctgcgagtctttggagagcaagaactgtgttctcaacctccaagtggtcccagcaccaagggccatatccagcacacacaggggcttaatacatgtttgctaagtgaacaaacagaactaatctatgattaaaaatgaactcccagtaatacttgtgtctcagtcctagttctttcctcaagagtctactgattgtgcttctccactgccaacatgacatctgggcgtcgagtccatcatctgacttatatagacttcatcacataggccactgttgagcagaggcacagacagacaagaccatgacgtcttacgtgcatttgcacataccttctttgttcaaactcccactccttcaaacctcaactcaaatgcaaggaccactgggaatcctttctgaatttccctacacaggttttacctccttctctcattgtattatggaaaactcttggcattgaaatctagtacacactcagtaaataatggtcactatggcatttttgttggtggtgaaggaggtagtggtttcaatatgattccctctgcttgaagtatttcccttatttataccaattatcttgatttattgtaatttatttgcatgtcttcttctccctctacactagacgctccaatgggtggaagccaagttttccccttgaaatcatgagtatccattaggcagaagacactgtaataataatagtctcaaagaaaaatatggtttgtgcgtactgtccaccaaaccaggcaacagcagagtttggcctgtgtactaaatccaaccatggtctggctttgcacagtgtgctgagagaattagagagatgttaagagaggaactggaggtggccccacaaaacccaaagcacttactctctggcccgctacagaaaaagtatgctgaactggacactaaacacagaagcatctggcttgtaatttgactgtggctttaatttcttatacgatgacctcacattcgcttacccagaaattctaccaagggctcagaaatggcttggaccctagattgggcctggagagccctgatgggactaatgcatccgcacaccaaagggaggcagttttgtgttttaaaagcatctgctagtacttcagattttaaacatttcctctccagtcattgtaagttgagtctctaatttttaaaacattatgagtcaggaggaaggaggactgtcttcagttgcttgtggggccaagccttcaccaaaaccacttcagaaagcaagttccttaaaaaggaaccagtaaccaggctgagttggtgtaggaagtgaagctgcaaaacaagggtcagaacacagcaccgttcagtcagaaaaaaagatggaaatctgcccaaaccagaaacccaaagtgtaatgtgcatgtatactcacgaggaatgtaactggacaccgctggtgggtctacactgtgttctagggcaagttggttttgttttcctacttagggaaaaatttggtttccatgggccctttaaactggcatagctttgtgtttttgttgctttactgttacttcttttttatgagtaaaacttttctctgataatgactgcatcttcctaaaagcttcttctgagttcttattttcaaagaagccgaatccatcttaatattttcttgccataattgccccaggccaatttcttctaaaggaattaaaaatgcaaatctaatattctaattgcataataggataatcttggcagctagatcaatactatctcccactgtcaataatacggccgggatgtgtgtatgtcagagcccaccggtctcactttatcactggccccatggcccatccacatctataagatgtgacattttattagtggccttccatcaatcaactctaatttgtgcatcagagagatgcgtgttgtcatctcagcatccacgttgccctgggcaccagacaacacagagctgaagcctcatgtttccaaggactaagttaaatggcaggaaaagggtggatgacagctccacaaaggatttcttcctggtggccatccaatgaattaaaaagcaaagaacctacaacaagtcatctcaaagaggaagactccaaaaaataagaatgtggacagctcccaaacctgtcagtgcagctacaaaccattgcaggcagcacaggcctggagtcaggagacctggctgtgaggtccggcttggccattccgtgctgggtcacctaacctctatctgcctcattttcctctcttgtaaagtaagagtgttgacctaggttgttccaacctaaaacttatttgacttcaagcgtagtaaagattgtactctggctggatgtagtggctcacgcttgtaatcccagcattttgggaggccaaggtgggtggatcacaaggtcaagagattgagaccatcctggccaacatggtgaaaccccatctctactaaaaatacaaaaattagctgggcatggtagtgcatgcctgtagtcccggctactctggaggctgaggcaggagaattgcttgaacctgggaggcagaggttgcagtgagccgagattgcaccactgcactccagcctggtgacagagtgagactccgtctcaaaaaaaaaaaaaaaaaaaaaaagattgtactctgagtagcatgggtgaagatgtctgtcagtttgatagcgatcagagacatcgttgatacttctgggcaatttgccaattaacagtagaaacaccataattaacacttatcatccaaactatatttccattaagaagtgtttttccaatagctctccttcgccttttaaatgttcttagccaggcacagtggctgacgcctctaatctcagcactttgggaaactgaggtgggaggagcacttgagccccagagttcgttgagaccagcctgggcaacatggcggaaccctgcttttttttttttttttttttgagacaagtctcgctctgttgcccaggctggagtgcagtggtgcaatctcggctcactgcaacctccgcctcccaggttcaagcaattctctgcctcagcctcccgagtggctgggattataggcacctaccaccacgcccagccaatttttttgtatttttagtagagatggggtttcaccatcttggccaggctggtcttaaactccttcctgaccttgtgatccacccgcctcggcctcccaaagtgctgggattacaggcgtaagccaccgcgcccagccaatcccatttctactaaaactacatacacacaaattagcggggtgtggtggcatgcacctgtagtcccagctacttgtgagactgaggtgggagggtcacttgagcccaggaggtcgaggctgcagtgagccacgattgttccacttgactccagcttgggtgacagagtgagaccctgtctcaaaaaaagtaaatgaaacataaatgttctctctgtagctgaaattatttttcaggtctcagataccatactatttggtttaaaatattttggttcaaaatatttggctcaaaaaatctgcttcaatttacccaccttaaccagaaaaaaaaaaaaaaacttgtataaactgtgtttaaaaaatcataaatgtccttaaatataattaagcaatagggtataacaaaactttaagttcttattaaatatgattttagggaaggctaattttaaagagataatcagaacaaagacttaaattctttgatgaacaaaatacctttccaaatttatgacagcatacaatgtaactcaaaatgcaatttatttgactttggagaaaaatgctctgtatgtattttacttgtaactgtagtaagatttcttgttgatatggttctttgcagtttattcaaataacaattatccactacatgctgggtattgtgtaagaggccttcatatatatttttaaatttggttcttacagtgacattggggattagttaagactggcattattgtccccgaaggagaaaatgaaggctagaaaccagtaagagatgtccccagaaattatcagcaatgtgaaaagtgacagaagactcaaggatgagttaaaaaaaaaagaggggggggcaggaaaaaaaagaaatattcctgaaaacttgaggcaggcaaattttccaagaggggtaagtgaagggtttggagaaagagagggagctggggcagaggaagagatacaagccctctgtgaaatacaaaccagggggcttagtattgatccttgggagaacacaagaactaatcgttgcaggttgatctttgtgagctcggggaggagaaaacggtgactgccaagaggctcttccacagttacccgattgaatctcgtttcctctcctgatagggttatcaggcagggggatcatggatctgaatttcagcgaggcacttgacagagttgctcaggatattcttatagacaagatggagaaatggggatgggagtaggacacagctaagtggatttgcagctggctgaacaaatgcatcaaagtgttgaataatagaatgatgtcagcctggaaggaaaatgagccttgtgctacagggctctgttttgggccctgttctgttcagcaagctgatgggtggcttgaacagaatagtagaaggaatgcctgttaggacagtgaatgacatccgtatgggaggaactgctaacacattaaacaaaagagtcaggatccaaaatgttctcatcctgctagaccaatgacctcaaaccatcgagaagaaatgtaatcggaatgaatgtaaagtcctttaattgattccaaaatcaataacacaaaaaaggatgtgagattcttggcttaggagcagttcatggagcgaagacctagccccctggcaaaacgtgctcccattaacatgttgcagtcactaacaaaacttaagggattttggactgcgttagtaggagcccagcgcctcctccaaaagtagttataattccactacatgatggactggtaaacacccggtttcaggtgaggtgctgcattttaagacaaacagaaaattcagagaagggaaaaaatactagagaagatgtggctttaatacaaggtgagaaacggttcatgtgattggtgacatttagccaaggagaggcaaggtggcaatcttctaatatttggagagctgacataggaagaatgagaaaacaaaatcatcactgctctacatggattaagagttacagaattgtggagtaagtctcagggcaacctaaacatgcagttgccacacaagcaactgagttcccagcactgaggggattcacaggctgggctggtgggagaagcatttcttttcagagtgaaaagttgttttgcctaattctacaggacaaaataatcttgatatgtgcagaagtgttgacaatgaaattgccataagtattgcctgctgattaaatccaacacatatgccttagccaattatgatttcaaggtactttgtatacatagggaaggtgtaacgaaaaagtaaaaataaccacatcacattgtgttccctggaggagcttaaaaatctaaagacatataagtaatttcgtttaaataaaagacaaaataaaatagattattatattttattttaacagattataataaaataaattataataaagaaagagaagccacgcatggtggctcatgcctgtaatctcagaatttcgggacaccgaggctgggatatttcttgaggccaggagtccatgaccagcctaggtaatatagtgagacctcatctctataaaaataataaaaaatttaaaaattagccaggcatggtggcacacacctgtagttccagctacttaggaggctgaggtgggaggattgcctgagcccaggaattcaaagcttcagtgagctatgatggcaccactgcactacagcctgggtgacagagtgagaccctgtctctaaaagaaagaagaaagaaagaaagagctataggataaagaaagggtaagaattaattttaagttgagttagaggctgatcaaagaaggcttcacaaaacaggtagcattcaacctgaatgcatattgggtttccagctcaagcatccaggcagctcaggtacagccctggtgaaactctaaacgtggccaccctgcatcttttcctgtatttagccatttgaacggccatcttgtctgtgctgttatttcaaagagattttgttctctgcccatacctggcaacttgacagtttagatctcctttgcttcctgccttccctgtcaccctcattgttatgagggactagccttcaattcttctgcccgtggtcacctgtagacacagccctggcacaggagtcgcattccatcagttttaccatgtaaggtaacctgatcacaggaaggccattccctcaccattgccgtatttttggttagagcaatgcagaggtcacacgcctctttcaggtctgtctgctacaggtgccaggtgggggtcagttagacacttgaaacaagaaggtggaaagatagggcaggtgtgaagcaggtgggcacttcagagctgggcactcaaccttggggattccttcaggggtgcaattatgttcctctctcctcttgcctagacaaatggcttgtcatccttggtcatgaaaaagacactttacctttcaggcacgagggcacatcccactcagcaagatgagctaagatgataccatctgccaccctccttgagctctcccccttcaattttgtgagtattcctcctagcccttgaggtagtaatccacacagcagtagttgctgacatcaccaggattgacaggtctcggccatcacacaggctcccagcctatggctaagtaacattatcccccaggctgtgtgtctatgcagggcacttcccagacactaccagctgcttagacgtacagttcactcccagtggtttaaaccccaaccaggactcagagattgttgctgcatctctgtctctcctctatcataatgccagctgtggcctcccctgagagccgactatttaaaaattaatcaccatgtttcattccacatagaagctcctgttctatttatttctccttcttcttcagatcctctcctggaaatctgatggaaagagccatatgacttatcattttcttcctctataaagtggtgtgaaaattacacagaaggtcatcaggaggcacttctcctccacccacagaaggagagggggtgtttccaacagtggctaactgttgtaagtctgatgctctttggggcattgactaatggtaagagtaggtggacgtctaagtggcctcaatccttctctcttccatctgtagtcataccctttgcaatatgactttgtgcctcttcccattaagatgtggagtctatttctccataccctgaatctagcttattgttataatttgttttaggcaagagaatgaagtgggagtgaaagtctgccagtttggggcctaggtattaagagtccctgcatgcttctacctcactctcttcgaatgtactcagcctccctgagaacaaacccaggccagcttgctggaggaggagagactgcttggaacagagacctgctatcccatcatactctatccatcattctccatcccagcatagccagcccccagctgactcagaaggtgaatacaaacacatgaatgaagtcacctgagacaagaaaaaccaccaagctaagcctagcccacactgccaacccacagactcatgaatgaaacaaacggctattgttttaagctactctacattggggtggtttgttatgcagtatgatctgatgcaggctccatggtttatcagtataaacttccacatcgccagtttcaaaaaagccaccacctgactcatctcaaacattcagcagggtgatggtgtccccatttttttttccttcacttgatcttctggaaccattttcttgaggctccaggacctaacattgaaactggaaggaaagggtcttgggggatgggttgagttgccatacttttccttttcacaaaagtccttgcaaagcatatttcttttatttcatccttggatggttgccttcaattcctttgtttcataagcttctattctcccaaagagccacgacagcattgatttcaacctatgattgccactgaaatattaaaccctattgatttgaaactcaggattagttgcaagttggatactctgcatattttgaagatgggcaattttatttcttctagttgaagagtaatcacagcctcctggtattcttgttttttgatgtagaacttcaaatctgatttcttatttggttccctaaaattgtgaaatgcactatgttcactaactaatcactttactctttcaaatgaagccttcatacttctgagtgtgccggtgtgaaaatacacattctctccattatctatacattgaatactgtcatgatgattcctccacctccccaaacatcaacaaaaatcttactggctataagtaaagatatcgtattctgagtaggcattcagtagaataacttttcttttactaagcagagtttatcattagtttgatgtctactgaaagcataccactacatctaagactcccattagcttgaagctcaccccagtacatggctactactgaaaatttttgtcctaaaatgccctccaagaatagagcatcggactgctgaaataaaacttctctggataactcaagacgggatctgcaatgggttgtctgaaaaccaagttcatctgaagatgcaaaaggctaaagacgtggcgatcaattgtctcccaattcttaattcatagctgcattaatcataagcctctccaaaataaaaacagttaaacattttgaaacaaaagacatttcaaaaaatgtatacactggcgaacatttttacttaatagacatatatctatagaatagctgtattcaactttaaaagctgttactctagtgtgtactaaatagagcccagaaacacaaggtccccttccctcttgcttcaccagaggtctccccaaaccctgacccacattccttacccctccctagtgttcatccaggagggagcccagtggcagagccagctgtcccagtagcatagcggtaggatggagtgagagtaaggccctgggggaagccgcagccccgcaatcctcagactgtattttcctctgtctcccacaccaccattctatgaccttcctcctccttcacaccaagctttggcattacttctaagataagatgtctagaaagtggagctgcaggggtcccttttgaaatgtaggtgagatgtcctaagaacctattcccaatttattctttgatctatcccttcctttctcaagcagcactcaaaaaaccagtctgacatctgcaagccatggcagacagagatataaacctgtgatcctaagagtattcaagggaagtcctgctgaacttagcctttcccaacaggctcacagataaaaaatgagcaggtgaagagcagacaagcccactcaccgttgtctgtgtagctatcaacttgagcaaattaacaaaatattaaattaaaagtaatggcaaaacccacaattacttttgcaccaacctaataaccattaaattaaagaaagaactcgggactgtaagcagttcatcaaggagtcttacgacattgggttagaaacacaaaatgcttgtatttctctaattacttccccccgccctttgctctgttgagtcttctttttatactccttaatagtgtcctgggtggattccgtacctttctagttgtttaaaatgtgaaagtgataaggcaattaatgaagggccattgcaaaccttcagtctcaatcttgttttcagtcgtacgccctctgtgtagacttgagtaggaccttaaatgctgaagggtggggcagtgaggcaaactctgcttctgcaatgcccactgtctactcccggttgagctcctccagttgataggaaggggccgtgtctctattcacttatgtgacctctgatggcattctctctcagatgattgctgcagctgtactggctggttgacttgcaacttctctgaggggcagcatctaagcactgtctctcttatgggaacaagtttgaattctccagcaggctctgaaggctctgtcatctcccttccctatctccacctactgcacaattctgtgacataggattcctggttctggcttgacctctccaaccccttctccatagctccctttaccaggtgcaaatcccatagccttctactgctaggttccctgtgcccagtgaacatcccgccttgttgggtacgagcaagatgactcaaacccagctgtcattccagggtgtccactgacccacaggaaacccagccatccttgccatgtggttggtatgtgggcttccaacccctacccatcctgctccccgctccatttccctccaataggcaaatcagcaagtctatcacctaagccaatgtccagcttggaaaggcaagactcccttcctttcccccaagggcacccccaatttcttagtactgcttccccaggtatcatcccacttgtcttcatggtgagacttcattataaagacaggaagaggtgatgggtggtggctggtggcagcatttttggttccacgaagttctctgtggtgcagatcttgatgccctctctagaatgtgggcattcttgatggcttttgtttcaagtcaagcctgtatttgctagttatgggacaacctaaagagtctcactaagcttctttgcatttgtttcttaaagcttacatcacagataataacaaacagggtagttaaacaacagaagtttatcctttccaggttctggaggccagaagtctgaaatcaagctgtcggcaggtccatgctccttttgaagtctccaggagatgatccttcattgcctcttgcagcttctggtgaccccagatattctttggtttgcaggtgccacacccacgctctgcccccatcctcacatggcctcttctctttgcctctgtgtcctctccttttctcataagcacacaagtaactgaatagaaggcccaccctaatccaatacgacctcattgtcatccattacatctgcataaactctgtttgtcatttatttggcaataaaagtcatgcagattattggctcagaaaggtgtccctagattcttcaattaccctggacccaggaatacccagcacctcactcctcaggccctgactctccactccctccagctaccatgttgtaggtgcagggaccctgaaggccaccctggctttcacaaccagctcctagcagggggaggagaagccttctcctgtctctgaaaagagaagctatttgttgagacacagtgacattctcagtatattttcccacaaagtcagtgttccattggtcttacatcttctggccctgttggtattacaggacatggctcagctgggctttagttagctgtcctgggatcctgcccttctttctttgagaaagaatattctaatgcccaaaactaacttctaaatgtgccttttcataaggtggggattccctctattactactattggggaaagattttttgtataataaagaaataaacacagacatgtccaacttgacatatcaagccagaggaggtgtattaaaggttgaggagctcatataggaaaactattattcatcatttattcatcattaaatataaattgtcatcaaaaatgttttaatattttttattgtgtatttttaaggtgtacaacaggatgttgatatatacatatgtagtgaaatgattaccacaggtaggcaaattaacgtatcacctttcatagtatatttattcatttttgtcttcagagcatctaaaatatattctcttagcaattgtccagtatatgatacaataattgcctacagtcctcctgccgcacattagctctctctccagacgtattcaccctgcattaactacacgtttgtaccatttgattcacatctccccatttccaccgttctactgtttttatatattcaactttttcttagattcgtcatataagtgaggtcgtatggtatttgtctttctgtacccagcttttttcactgagcacaatgtctcctggttccttgatgcagtcacatatggcaagattgcctttttttattattttaatttttgtggttacacagtaggtgtatatattttatatatttatggagtacatgagatattttgatacaggcatgcaatgcacaattaacacatcatggaaaatggggtatccatcccctcaagtatttatcttttgtgttacaaacaatccaaggttatactttcagttatttttaaatgtacaactaaattattactgactatagtcaccctgttctgctatcaaatactaggtcttattcactctttctattttctttgtactcgttaaccatctccacatccccctaaagattgccttatttttaaaggctgaataatattcttcattcattcatccatcaatggacacttaggctgtttccatattttggctattgtgaattacgatgcaatgaacatgggagtgaagatatctctatgagctcttgatttcatctctttgagtatatacccaggagaggaattgctggatcatatggtagttctatttttaattttttgagtaattccatattgttttccataatagctgtgcgaatttacatttccaccaagagtgtatgagggttcccttttttccacgtcctcatcaacacttgttaccaagtgtctttttgataatatccatcctgataggtgtgaggtgatatctcttcatgattttttgcacttccctggtgttgagcactttttcatctatgtgttagccatttttatgtcttctttgaaaaatttctagtcaggccctttgaccattttaaaatcagattttttttctttgttattgagttgtatgagttccttatatatattggaaatacacacaaaaaattaaaacagtttttacccatcccccaaaatattgataaatatttttgacactatatcaccagctattaaaagtaattatttaagataatgcatcatactcaagaattaaaaatgaaaattgtatttagcagttttttatagcttggagaaatattattgaggctgaattccactgaaatgagataatgtcttacaagtgacatacatataattattaataaatattaatataggacactttttaaaataaatagacgtaagtaaattttcaaaaagcaatcaaagtagaaacacagaacgtgaactttcaggcacaaatagtactttgacatggtctcattctttctgttgacatttggttgtacattattcaaagatgctacagaaagttgctaataactggctgccagagatcaaaaatcttgtctaaagagacaaaaaatattcacacacacaaaaaggtttttaaaatactcaggaacttttaaaagacatctcatcatcaaactgtaaggtccccaatgacaagaagcacatgtgttttattttctaatatacaccactggacacagtgactggcacatagatggcctcaagacattgttctagttgaaaacatttgggcacaaatgataggcaactctttaacctgagcatctgaatttggacatttatttttaaaaagctgacaaagtatataatcaatatttctgatgagaactcagtcctgcttttatatttttcatgtaatcgattttttaacttttaacatttaatacctcaaggctcactgataccttatacacctcagcatcatcataatactagaccagtgtaaatgccaggagcctaaataatccacttttcaattaacttatttagaaagttccaggattgagtgaactaaataaagggagaatttttttcctttttttttttttttttttttttgagacagagtctcactctgtcacccaggctggagtgcagtggtgcgatcttggctcactgcaacctccacctcctgggttcaagcaattctcctgcctcagcctcccgagtagctgtagctgggactacaggcgcacggtgccacgcccggctaattttttgtattttagtaaagacagggtttcattgagttgcccaggctggtagcaaactcctgagctcaggcaatccgcccgactcagcctcccaaagtgctgggattacaggtgtgagccactgcaaggcagaaatatttattcatgatttgcctggcctgtgcagagagctcttctgaactcatgctttgctaggtccttcctacaggacaaaccagactgggcaatggaacactcatctttcctatcttccagcagttgtcaatctattatggccagcgttcagtgagactcctatgacatgaaacttacagcttttttcaccaggaattgactttggtcaatttcagcaaagtgtggggtttagtagaaggaaactcacagaatcaggaggggtcttcaaaagcacaagcccagtcctgggaccctaggaggagatgctggaactttctctcaggcattgtgggatgttgactcatctctggcttgccttctatcacagtgtgataaaagtttccatactcttgagagaatgcggaaaccattcttcaacctataggtaccatcaacctataggtacatgtacttataggtactacagggtcacatgtccacttaccagtgagatagagcccaggaaaaaaaatctctcccacctaagaactcacattgtccctagaagaatgtgctaggagactgagcccaagtcatctgtcatcagggtcaaacaggtgctggtttagggtatacccatgtgcaaaatggacaccgagactagcaatgatgttattactactgctaacatttatcaagtgcttattatgtaccagttgcccttctcatcttaacggctatctattaactcctgtttttcactacgacctgtgaagtaattctttttcaaatggaaacatctgaaatgcagatgttccagaaatatctcacctgagagactctctctgaagaagaccttaaattggttgagcctaggagacagacactgtggttagcagggttctaagatggttctctgctcctctcccgagatgcaatgcctcatataatcccctgcccttgatgtatggaggtctatgactccattttgccagtataactacagagatccctgctggccttgcaggagctaactaccatgctgcaacctacccatggagagggccgtgtgtccgggaatggtgggggcccctcagagctgagggcctgagtcctacaaatgcaacaacctgaattcttccaaccaccagtgggcttggaagaggaccctggtctcagctgagatgggcactgcagccaacactttgattgccacctttgagaccctaagcagagaaccaggtaagccgggtctaggtcccagcaccatgacaactgtgagataataaatatgtattgttttaagccactaagtttggtcagtttgttatacagtaagggaacctagtgtagccactgttaaattaaaatggagactgagcctgaagactccctgagtagacaagccttaactttcatcgactggcaaacataagcaaaactgaattaaagctatttcttgtaaatgcctatattaaagaaaaacagaacttaagcctaaccaatcagaaaaagctaacaaacttataaaaagagggactttctagcgggatagaccaaataaggcaactgtgtaactgtagccaatcaaatgttttctctttgctttacttctgtgttcatcttcaaaagcctcccccatccgagaacggtagctcgcacctgtaatcccagcactttggaaggccaagatgggtggatcacttgaggtcaggagttcgagaccagcctggccaacatgctgaaaccccgtctctatgaaaaataaatcaatgatacaaatattagctgggtgtggtggcatgcgcctgtagtcccagctactaaggaggctgagacaggagaatcacttgaacccaggaggtagaagttgcagtgagcagagatcgtaccactgcactccagcctgggtgacagagcaagacagatggagaaaaagccttctccatcttccctcagtggagctcatgaaccacctctggtttggttgctgtttgctctatgaattgctgtttgctcaataagtgctttaaaattttactgtgcctcagtttacttgcttaatgacaccaacagggacaggacttgcacagagcatgaacatccctgattggatggacagttcctgtggggtgggtcagaggagggaagaacctaccaaaacaggaccaccacacaccctgccaaacaaggggcttattttgcagctaaccaagcctatgggggcaaatctgatccggctcccattgtgccaggaaacctgatatcttctttagcctttgtatagacttaagagcactggagaatgcctccgaaaaatgcacagatgggcagtattgtgtacacttcaggcagatttcaggcccctgaaatttccccttgtgtcctctgcttccatacccaggaacccccactctggatcatgctttcccaaggtggggccatatggtacccaaggaaatgagaagcggttttggggggggaaataaaaatatcttattatttttatgcatgtagcacaaataaacataggatacataaacagatttacagtatatctgtggtgttataatttcatgggagacaagaaaacaatgtcttaaaaagcttaaaacagggagaagataatgaaaaaaggtggagaaacactggtgtagacaataatagttcatggtcaaaacagagagaggctttgagacactgataatactctacgtcttgtcctggctggtggttacatcgatgtgtttgccttctgaaaatccacaagcacatgctaaagatctgtacgctttatgtaaggcacacttcatcaagaggaacgtttagcaacaattggaaaagcagaatccaatgttctgacacttctagctaaagacgctgtcacgctggagtgaaacacacagacgccaggcagatatcgaggctctatctcagttcctccttttcctcgtgtgcgaccttggctaaataacacacttccaagcctcagcgttctcatcgggaaaatgggtttaataatacaatctgcctcaaagggtagtggtgagattaaatgagtttatacatgtagagtacttaggacagtgtgtgaaacagcacacgctacagaagttctgctagttctgctgtcctgatttgttgttgttgttattgttgttgttgttgtttgttgtttgtttgagacagggtttccctctgttgcccaggctggagttcagtggcacaatctcggttcactacaacccctccttcccgggttcaaacaattctcatgcctcagcctcctgagtagctgggattacaggtgcgcaccaccactccaggctaatttttgttatgtttttagtggagacgtggtttcaccatgttggccaggctggtctcgaactcctggcctcaggtgatccaccagcctgagcctcccaaagtgttgggattacaggcatgtgccaccgcacctgcccatcctggttttattgaagctctttctgctttgtcctttctctatcaactttaagtttctgaagaacgggaaaaaccaccagcggttatctttccccagcccacagtgtggtgctctgcaaaagctagatgctcacagtgttgtggttgaagttgtggaatcatttactttcttgtggcattttgatacagttcagaattattgatcttggtttctgggaacaatatggttacatattagatactttcagaccaaattctgttttctcctttaaaaataaggtaaagggtcacagctccccaggcttgacatagacgaatgaccaactgcgagtcaggagcccacggctctccttccatctctgctggccaccggctgagggatctttaataaaaaattatttctcccacacacacaggcctgggttttctcatctggacaatgagacagctggatcagacaacctctaaggttcttcctgtgtggttatatagttaataataatcacaacaataacagcagcaggaacttgacctttaatgtgtgccggacaggagtcagagtgtattactcaccccttcagtccccatgatatatgtgctctcattatccccattttacaggtggagaaactgaggcagagtgccccccccccccccgctggtaaatgacagaaccaatatctggctccagagcctgtgttcttaaccattaccaggtactgccacctccaagttcataaagacataaaacataaattattcacatacttcccctagcaagcagtgtatacagccagcaccctcaggcctctgtgacactgtccctcaattcacctttcaagaagcaactctgcatccactatttcctgaaacttctctcagtcagcaccaacagccacaccccctacttttgcatgcatcccaatctggggctctaggtgatagtcacagtgttttgtgttggtccctgttattttattgaattgtcccatctccccaagtaaatgactacccttctgaggtcagagactatcttcatatattgatatcctccttcaggagcacatagtagaattcaataaatattacaaccagagcaccacttgcatttacatatacagtcatctctcggattccaagggaaattagttccaggacaccctgaggataccaaaacccgaggatgctcaagtcctaaagctggcccccctggaacacaaggatatgaaaagccagccttttctatcagtgggttccacgtcctgcaaatacagtattgtactttccacgtgcggttgtttcaatccatgaatgtggaatgtagggataagaaggggcacgtgcagtgcatcctactctgatataatctattgatttagctgatagaatgtggtatgaggacaaagagaaagctcgactcctgagttcatggttgtgggtggatggtggcatggtgaaccaagacaggccctagaggaggagcgcacttggacagggaagacgagggtaggaagcagaatgtgtttatttctacaacacagtgtgagaactgagcaccagatatgcaccaagttgccacaggaacttcctgaggagccctgaactcttcactcctggcctcacaagagtgaccctggaggagcaatgcatcattgcaacgtcatttccatgttcacctttttgaatattaatgaccctggctgccctttgttctgctggctgtacctgtccctagaggaggtggaggcacagcagttgaactcagggtttgggactgaaattccatcaggcctttggatcaatggaaatcttctatgctatgacagtgacacaggctcatgtcttctttcacttaattccagaagctgggtgacatgaagtcgtgttcatgagacagaattccatgtaagctctaaccccaaaccctgtggctgtggggccagaaagcacacgagcagaatcgggggtctgtgttgaatagaccactcaccgcaagtggctgtagctacaagtgccatgtcctgatcccaatggattcccaaccctgctgtctgggggaaaagctaattttaagatttatactaggaatgcacacaagaaaagaggatttgatcttttttggcatatctggtttgcagctgtgtgtctgcactggattgttaataatatcagaaacatatctgaaccacctagagatgtgcctctgttgtcaacactgtctggaaatagctgtcaggcccacactaaacaaggctctcaaagaagggagagaggagaggttaagtgtcctaatagaagttataaaaacctatcagttcaggaagaaagaccaagctgcaaagacagggttggaaaatgtgctgtcactgcttgagtagtggccaaaatacctggaaacctgagagaagcaggtcagggccagtgcacagtccaaagtagtcatggcaaatatgcatccaaccctgcagcatttgtttacccgtatcctgcctattgcctgactatcatctacagctgggagctctgtgtgattaaaggccacgtagtgcaatccccgtctgaggctaacacatacctacactcacacatcaactgcagtagacacaacaagtgcccatccatattcctttgaaccttctcttttcagtgcctctggccccagttccaaattccagcacctgcacctctgtcaaaaggctttctctggccaccagagcctgatcttctcatagatattgtgggttggaactgacaggaaattaatgcctccagggccaaaccttacccagtgactgatgggagttggtaggtaaatacaccctgaggtggaaaaaatctgacattcatgttcaacactgtttaccagagtcccctgagggagtgaggctctagcttcccacaaaaatacttgctgagcttgaatccttgtctcaaaatctgtttctggggaaacctaaacttcgatacctggatgtatattacacacacataaacacacacagtactctactattcatagaaagttttaaattgtacaacaccctttacttataccatcttattttatatttacgtcaactttgttattgtttctatcattccattttttaaaatgaggaaaccatctcacagaggtgaatatagatcaccaaaagtcatatagaaggctcaaagccactacctgctgctatcaatgcttttggcttttctactgcatctatgctaccccagtggaggataaatcaacaaaaggccacactttcaaagagctcacttatagtcagagtgtctcttggtaaaagctaaaagtgctggaatggcagagccatgtaacccttggagttactactcatctcccacaaagtctcccttattatctcctggcacatgctacaaacaatagtaggtggtgttcaatagctacatgatagatagaaagatgaatggatggattgatgatgaatgggtggttggatggacagatggatggatgaacagatggatggatacatggatgaatggatgatgaatgagtgaatagatggatagggatggatggatggatgaatgaatggatggattaatggatggggataaatgaatgtatgaatgataaatgggtggatggatgaaataataagtggatagatggatggatgagttaatggatggggatagacgaatggatgtatgataaatgggtggatggatgaatgaatggatgcaaggaggaatggatggatggatggatggatggatggatggatggatggatggatgatgaatggatggatgaccatatcagtccacaatgaatgtctgagcctactgtagccttagccttagcaagaacaaggctgaagttacaacttaaatgtgatttgcatgtaacttttgcttattttattgtctatttaccagcaccaaacacatctgagatgatgtgtatgaaaatgacatctactaatgatgtcagaacagaaagagtttgagaaaaacaagtgtcaattactcaccagaggcggggtttattcttatgctttaggaagaataaaaaccacctgggaagtttataagcttgttaaaaatactaatttccctaccattaatagaagagtctaattcaatggaactcccaggaatcatgtaatatccttgggtaattcacagggattgtgatattctaagctgagatgaaggcatccccttcaaataggcattttcttccctcctctagattattgtcaggattcatcttattgcatcagcatcacaagtacacaagttgcttgaagagggagtcagaagcgggatgtaaaaggcattaaccccaccctggatatgcactgaaagcgttatgggcaaaataaaataaacatcctagactgggaggagaagttaggggcctaaaaattgaactccacacccagcatatacatcttttctaatgcaggcaacagaaggctgttctcatctttgcttgaacacattctgttatgggaagttctttacctcctgtaactgttcattcatttttgaatagtttggttacaaagttcttagtggttccatttctgttcaatgatgctgtaagaattaggtaaaatcctcatgtaccatgatacccagtggaatatatagggataactggcatgtcagttctaagatgagcacccttatttcttcaagtgtccatgtatagggtttgatgaactcttaagcatctgggttgacatcctctcgacctatcattgtttatcagtgtttctctgagaatgcggtactaaatttatccttccagctgtgctctgataaaagtagagagggcccatcacaccctttattatggacaatctacctccatcattgccttctagaatcacattagctgatctggtagccacatcctattaagccaaaactcaattaaaacctctggagtcttttgtcactggaaacctctctgtgtgtggccattgatccagttatcagcactctgaataaagccactcaaccatgttgtgaattatctgactattcagcctgcattttggcatctctccatgtactccacgtagaaagaaatgcattgcgtcttcagccttcctctgttcactagacctgggtagagctatcaaaatcaattgtctgacccctattgctggaggcataccatcatattagagaagagacactggtatgggatgtgataataccctcgtaaagacacaccaggtaacactttctttccagagagtagatgtataaataattgttctcatcattacaaaaatgaccacttcctatgctggttcaggataatgaagaaacacagggctctctcagcatactcaagaaacaaaactttagtctgaaagtctgctgttttttaaaaaagtactttactccatttacatttattctgattactgatcatttatttagatatatttttgctataattttcctttcttttctgttttattctttctttttcctttcctgccttctgctctattttgggatatatttttgctacaattttcctttcttttctgtttttttctttctttttccttacctgccttctgctctctttttttttttaattccttttttcttactcttcttttggaattatttatccatacttctatactttcatgaatatatattaagcataatttactattattttttatattctgaagctaatcaatatctctactatctttacaaggtaaagatcttagccctctttaacttgcccccaaattctgctttcctatcatctttgatattattgttcagtatcatattcattttcatttttaaaaactcttaaaatattattgatattagtattattcttatagtagatttgcgaaatgttttccccagtttcttaactgcctttgctccttgctgtccactggctcccttccagcttccacctcctccttttaacattgcattattgcatttgacctttcaggtagtgagtctcttagtctttgtatgtctaaaagtatctttattttaccttcattcattatagagcaaggagcgaaaccgttttattgagaggtttctgaggggactgaaaagaggggaaatgatgaggttctttgccagaatctcttcaggcagctcaggctcctatccgctggggaaagccctactccctcttgagtgatcatttaactgaatagagacgtgaaattgatagtttttttcccttaccatttagaaaataatattcacttaccatctaacatttgtcattgccaatgagaagtgtgctgtcggtctgaatgctgctccttttttaggtacgctttttaaagacttttatatcatcttgcatattctgcagtttcactacaatgtgttaggtgtggattaataatatgtatccttctcaaggttcagggtgctactgcaaactggtctaattatttttaactatggaaattctccactaatttttaaaaatattgtccccagcactttgggaggccaaggcgggtggatcacgaggtcaagagatcaagaccattttggccaacatggtgaaacccagtcaatactgaaaatacaaaaattagctgggtgtggtggcaggcgcctgtagtaccagctgctcaggaggctgaggcaggagaatccctcgaaccccagaggcagaggttgcagtgagccgagattgcgccattgcactccagcctggtgacagagcaagacaccatctaaatatatatatacagtatttatatagtatctcccactcattccataaattcctcctggaaatcctgttagccgtattttggagcttcttgttttacttttaccagctcaatttataatttgtatttgtatctttttaccttttggagctgtattctaagtggatttgtcagctctatcttcagaaatgtttctccaattgcatcagcaatcttctgtatcttttgcaaatccacctgttttctttcgtcttacgttatgaaatctattcctcacatggtcactttggacatctaaatcacgcttattttcagctccgtggactttactctcatctgcagttctttctgaacactctcatttgttgtatctgtaggctgtctctctcagtggtaaatgccttcgtgtgtttgtaatgctgatggttacttgagggaaataagaatgtaccacttggctcagtgtgcatgatgtaagcttgtctttgttgtatgttggctcctgaagaaattccacccatgtaccctgggttatgagggtgatcccatggggtagtttaactttggcttctgcagaccccctggggtccaccagctccacgtttttttttctttacatcatctctgcgctaagctggtttttgttttgttttgatttttttgagacagattcttgctctgccacctaggttggagtgtagtggtgcaatctcggctcactgcagccaccacctcccaggttcaagcaattctcctgcctcagtctcccgagtagcttacaggtgcacaccaccatgcccagctgatttttgtatttatagtagagatggggtttcaacgtgttggccaggctggtctcaaactcctgacctcaggtaatctgcctgcctcggcctcccaaagtgctggaattacaggcgtgagccaccgcgcctggcctaaattggtttttaatgagatttcatggcttgagtctggctgtgtgcatttactctcatgctcacacattgtggaagcttgtgcattctgacttccctcaagtaactctttttctacccaagatgtcgaatataaagcccacatctggcgctggtgggtagaacttttaattcccatctcaataacaggacaatctttattgctggaagttcagtcccatcttctaccacccaagaatcttgcagcttagactccctcccggtgcagtttatagcccagattcatggtagacgccttaacccaaattccccaggccttctgctctaactctggcttcttgtttcagcacctagagatcttccttttccaaccctccagctcatctgtggactttcctgtttttgttatttttgtagtagaaggggactttcccaattatctcagttggccatctttaccagaagtctaaaggaactttggaactttagaggaaataattcacaggcaatgctttcccctcagcctttaattggatgtttttccagccatacatctctgcatccaagtcccacaagagcaagcaagtgccttcataacaagacaaaaaaaaaagacaaaatattcactaaagcaaaagccaaaccttacagaaactactctaaaagagaaagcaccatgtgaataagcaagtttcaatgttctcagtgaacactagtcttggtatcttctacatgctcatcaaaggtaagatgctggttaagcaaaaggaaagtttctgcctttgtgtccttggcccaaaagcgaaagaactcataatataggaagcaccatttttcttgtaaatataatttggagaagagcactctttctttgcaattcctccccttcaccccaactctggtcagaaactctgagcagttgtgtgtgtttgcaaagctgaatgagcctgaagttgagctgttcaataatgtacaatagaaatgttaactgccgtattgattttttattatgtttgtattgcctgtttaattttattttccttgcaggaaattttttaatcaaaaatccagttattgaagagccccataagccaaccgatgctggtgagactggaggaagcataggcattaagtctctcctggttattccctcttccaccttcacccactcccagtcagagttcaaaactgaaacctcctccaactgagagtaaatgcatgtgaccttcagttccacagaggttaacctactctgattaacttttccatgttattccattaaataaaaacagttttgacacccagagactaaagcatcctagagataatataataaccctatgcaatcatttcaaattggattgtaataattcatttaggtgaccatacatatttgttatatgtaatatgaaacatcgcaaaatgaaatcaatagaaatgtttcttgttaatgaagatatactgggctgttatgtgtgggttgtggactcaatacccacagaaatcttatttgtattataaatttcagggtatcctgagagttacaaatgaagatagcatttcttaaagaagcgatagctggtcatttagaaaattatatcataaattttatgtcatttcttggtctttcaaggtctttgcccagcaacatagtcttgtgatttaggtaaaaattctggctgagtgattacattcaactatttgcaaatggacttttgcccaaactttcatttttacattccagattttaaaataacttaactttagtaagtctgaagattttaccttatattttaatacagattgtagaatattttattcctcaacataaaaactgaagacacagaggcggcgacagataggtataggttatagatacaggtataggtataaatatataactatatacataggtacaagccaattaatgagactatgatagggtttcactggaatgctacctttaacttcacatatgaaatataatatagagtgtacatgtttatatataaataaaataagatttttaaattttgcattaagtaaactcatatagcgttttagaggcaaattttaataagttcttctgcattttgaatgatatcacagtgagatttcaccatggcaaatatctgcagcaggaacaaagaattaatgaattaatgaactatatgaatctatttatacttctgttgtcaaagctcgtattcttacttctagtgagacctcacttacaccttgaataagacccatcagatgaccctcacctctagtaagaatgcagaattataaaatgcaaatagagttatttgcaataaataagtggtcatgctagaaaatacaaatttaaaacaggttcataacaaataacagtaagcatttttcttcatctattacctgttttcttggtgctactctcttttctgccatacctctggaatcctcaattttaaataactgcaaatttgcttttagataaaaccaattcttaacctgccttaactgattcaataattttaatctgaaatctggttctacctgcctccctcatgagcctgttggatttgggtggtgcccattccacatcactaaagggttgtccacatggagaagggctgcgcttgcctttgtctttacctcctgatttctcagtctcttaaatattttgagactcaggccttcaggctctgttgccctctaactttcctctgcagtgttttctaccctcctctccttaactgacccacattcacttcagactttggttttggtgtttggatccttaagcatccacatgtacaagtcactgttccttgaggttcttcacactctttctacaaaccacacctgacactttcaccaacaggagctgctctgcctctgaaactggaaaccctgagattctctttgttttcatcctctacttcactggctctcacttgtgcttccaatctgttatgggggatcttcaaaaagttcatagaaaatgcatactatgaggaaactatgcgtagatttcaaaccatattttgcactgaaataaatgagtactaacttattacggcatgtctgaacagaatcaagtttgagacactaagaacaagacatcattttgaaaaaagcccctttcagaacaatgtgaattctgctaaaatggacccaagaacaaacattaaatttatagtgaacctttgtggaagaatggtgaaatcattgatgctttacaaaatggagacgatgccaccaaagaaatcagcagtttacatatggataacttgttttttaagaagggatgagaccgcattgaagatgaaacccatagcagcaaatcattcacatcaaattgcaaaaaaaattaaattaaattaatcttattcaggacctaattgcaaagaagtgatcattaacagcagaaacaatagctaacactatagacaaatcaactggttccattttgaacaaaaataaataaattttgttcaaaattttgaacaaaaagttaaatataagcaagctttccagtccagtcaatgagtgccaaaactatcgtgctcagctcagctgcagaccagcgcagagctttcaatggaaattttaaacaagtgcgatcaagatcttgaaacatttcttcaaagaactgtaacagaagatgaaacatggcttatcagtacaatcctgaatgcagagcacaatcaacaagtggacattgtccagttaaagcaagagtggaccagtcaagaacaaaggtcatggcaacagttttctgggatgctcaaggcattctgcttgttgactttctggaggatcaaaacaataacatctgcttattatgagagtgttttgagaaagttagccaaagctttagcaaaaaataaaactagaaatcagagaaagcatcaccagacagtccttctccaccaccacaatgctcctgctcatcaaacacaggaaatctggggagagtttcaatgggaaatcattagacatcaccttacaatcctgatttggctccttctggcttctttttgttttctaatcttgaacatatctgtaaaaggcacccatttatcttcagttaataatgtaaaatatggtgcataaacatggataaattcccaggacccacagttctttagagatggactgaatggctggtatcatcacttacaaaagtgtcttgaacctgatggagcttatgttgagaaataaaaattttagttttatttttatcttttaattccatttttcacgacctttttgaagttcccttatatttccacctcttcaagggctagtttgcatcatcacagattccagaatctcacccttcatcctggctctgccctcatcctgataacatgtccaagctctacctacctttaaaaaacaaaggcagttccctgggctcccgtttcctctctagtgcttatctctctcctgcccttctcagggaaatttcttgaagggatagcttacacttctttctgcttctgcccttccctctcactgctcaattttaccaccacataaaactgctctggccaaagtccccagtgccccattaatttctaaatcccgttgaatatgtctgtctgtatttatctctatcccctgtggctatgaagtctcatttttgtaacattttcattccatgaactcccaactccatgaaaggtttctctttttgacatctgttcttttttaactttatttagattttaaatgaactatttcaaacattcacaaaagcacagagaacagtatgtctatctttctcttactttctcaccctcttttgtcttactgtcttaccctctataattgcctttggtgaccttgtccactgttttgtcccccttacccccaacagtgttcactgcaagaccatccccacatctcctgatctgtgagtctctctgtcctgctccttcttgccacccccactggatgtgccactggctgctcaacatagctgacctttttgccactcaccagcctgctctcctccttcattgtttctgctgaccaggtcagaaacatatgcacccttctggcaaaatcctgttattggatcttggaaatgtctttatactctgtccccttctcctatctgtccctccatatccccctgaacatggctttaattcaggttttatcctcctcattgtatttggtgtaaccgtctcctcattagcctgctttctgcagtcttaccccaccaccctccaatccattctctacccatctactacacacatcttttttctttttacaattaaaatcctatcatgtcacttatgtacttggaaggcattggggacccttcctaaactcaccataagatctagactgtaacatgggatactagctcctgctcaattcttggctcccactcacaaaccctctgctgttccaagctagaccacctgtccttcccagaatgccacgccctgggttcttccttggccacagggctaactctttcttccatcagggctgctctagtgtgcttcctcgtctgagtggctttgcctgcatctcaggtccgggatgataccgcccctcagcacacacctctgccattgctcttaccacgctgtggctactgttggcatatttgtctccctgacccatctgcgcaagcccagaaagcagggactgttctgaccaggatttactgcatttcctgcatctagtagctgctcaataagtaccaaacatatcctgactcacacactttttcatatgcatagagatggtatactgggacttaccagaaaatcaataacacagcgaaggattgtaaaaaccccagccagtaagggcacggtgttcatgataacttaaacaaacatttaaattgaagagccacactttcagttgctttaaagcaagtcaaatgaagttagcatcataaaatattcccatgtcctctaaagctattaattggtaacccataggcatataatcaaatgctcactcaaaaggctgaatccttgtctaagcacagaaaactggagcctgatttctgtgcatgaggtgatgcaccaatgacaaacctttataccagagcacgactctgaaattgttcacattgtgttgctgtgtgactatgggcagaaatgcagacctggctatttagaggagaaagaggaagaagggcaggatctacatctaagagcccgtgcccccaattggctaagaatcacagttaaaccaagtgccttatccctagagtctggggaggcaaaggcttgtcttcctctcatcaaataatatatatttacattcccctactaacttgccagttagagtaactggatcacactaagaaaacttatttccttttctttgattaataagctcaagattataatgtattgaaagtgaatatattattgtatattctccagagatagattcccatgcaacctggttattctttctttgttcccccaacaagtcaaattctctggtcttttcttccatgtttgatgtcccaggagtctagccctataaatgtcaccaatgggcctccttgctctgagtcttctgcttgggctcaaccaaagggaggcactgtcaggagattggggctggaggggagaaaggccaggacacttattcctccacatcctctgtgccaaccctcagtcttgcccctagctgcgctcctctgcctgtagccccaagccccatcaggagaggcctttcccatacatctcatctactcgccctgtcccttcaggccccagggcactaacagatttcactgatgctccccactgggtacaccactgccttgattcctttaccccttgacctctgaaatagcttcttcaatgaactcctggaatgggtcatctctttcctgccaggaatctgctggggaaaccctcctatgtgacttcccattccatgagcctcactgcagaagccacgcacatatgtggcgagacagtagctctttgtgctatggtccatggacaagcagatctttaccatggtcagtattaacccccaaatcccttcccagagttcccccagagaaagaaaaactaacagcatagtttaagaaattggcttacgcaattgtgggggctggcaaatctaaaatctataaggcaagccaacaggctgaggtaagagtcgattttgcagtcttgagttcaaatgctagaaactcaggcagaatttcaacgttgcagtcgaagaagaaattctgtctccattcagggaatcttggtctttgttcttatgaacaaagacatgttatagaaggaaatgtgctttacctaaagtcaattgatgtaaatgttaattatatctaaaatataccttcacagcaacatctggagtagtgtttgaccaaacaactgtcctctagccagctgacgcataaaattaacgatcacatccatccaccacatggattcagtttcctttggggcaaggaggtttctctttacttcaaaagctataagggctcagaactcacttatgtcctctgatacagtttgtattcacttgtgttctctgatacaggagtaaggaaaagaaatgcctaattaaacaacaaaaataaccaccttcctaccaccaaaggaaaccatccaaaaagccatcagagcctgcacagagtatgaccctgtctttttccttttttttttttttttttattgacactgattggcttgtgcttgaaactgcccaagaaatttagaaatataggcaatagaattagaaggagtttgaactgtgaccccagagatcaaaccctgacaactcggtatgttaaactgtattaaaatgtatggctttgaaggaagggatcaatatgtttttctctgtttgtgaagggcctgcactaaatgatagtgagaaacaagcagccccagaacacagatgcagccgaaggatttccatggcttgtgctaactcaacttggctatcttgatgcaaagggaaaatgtgaagggcttccagaaagaacagctgagatatttgctcactggtttatttgcaaaccaagaaagcagtttttagttgcgtatgactttaacaaccacatcactgcctctttgggcctgacccaagacactattttaacttacagtgaaatatgactgaaacccagcttctcagcctgtgttctatgggagatccagtaggaggctgaagggttttgcaatgactgttgtcctctgcttgctgccacaacccccatcaagactcctctccccaaggtacacccttcctcccccaccccttcagaactaagggaggcaacaacttcccaaaagttcatggctgcatttccatcccttcgtatgaaacctaatcaacagttctatagataatttttgggataaacacagaaattgatcgttctggtcttaaagctggaaacttacatttgttttatctgagttccttcttcagaaaatgaccttcaggcctctcaaagaagtatcaaagggccaggcacggtggctcatgcctgtaacctcagcactttcagaggccaaagcagatggatcacttgaggccaggagttcaagaccagcctggccaacatggcgaaaccctgtctctactgaaaatataaaaattagccaggcgtggtggcgcatgcctgtaatcccaactactctggaggctgaggcatgagaatgccttgagcctgggaggcagaggttgctgtgagctgagatcgcaacattgtatttgtctgggtaacaaagcgagactctgcctccaaaaaaaaaaaaaaaaaaagtatcaaagaactgaaactcagcagatcaccacatccagacaatgagatgtgggggccctcattcatcatgattgcttccttgcccctccctagtttctattttcttacacattgtttggtttctttcatttcttctatgctacataaatccctagctttagtccctcagggagatgaatttgagactgagctcccatctcctcagctgcagcacctgattaaagctttctttcttggcaatacttgtcatctctgtgattggctttctgtgcagtgagcagcaggacctagaccaaaccccttgtatttcagtaacatttacaaccaacagatgaggaaccacatgccaaaaatgtaaaaccattgaagtcctgggggaaaaaatcagtgccactaatcccagaaatctttgtaccatctcccaacaagaattattctttaaaacgagttcacagaggagttatggggtggctttttcacaatgtcctctgcaaatcacgatgtcatttccttttcacttgctcttgttcctgcctgcattattttctttctttctttctttctttcgttttttaagactgctttctgcctctgtggtcatcttccttttttttttttaccattcttttatcagttttcattcattatgatcttaagaagcctcagtgtgggctgtagtctctctctctctctctctctctctccagaaaagcatgctttcttaatggaaaagtctattcaaatgcagaggacctctttaccacgtgcatctgttgcaaaatcaccaactggagtatccaattatattaaaaggaattccacggaactattatcctaatagatggaacactcctccaataatcatccacacgagccgaagacccagattctctcatccatgcaccaaaacaaaggacttttttaataagaagcaaacataagggagctgcgagacatattaaatgcaagtggtttgcttttgtgctgtaattccttagataaatagagctcaaaacttacttccggaactccagagctttccttcctctgtgtaagtttttcttttgttattaagatggctttgcatggtttcagcttgcacagtcattttcatggtttcacaccaccaggcaaagtgaggacagcccatacctacagtgttggagctaccatgagaacaagatggacttttctttcttccctttgtgaaatctctgcaactacttgctagaaaggagccaacaggaaagagatgttggaaatacagggagaaatgctgaagagcactttggaacaggtactttcccttctcttcatgcagagaagccatccactggacatggccggatgatagctcttatggaaatccccatcactggcaagggcgtggctactgggtccaggtgccttagatgcagccagcaggatgcacagattaatatttttctttcccaaagagaggactggggctttgataagggatttctccagcgatacacagctggtaaggacagtcagtagctggcacacctctctcaagacctgacagtagtgtgagttagggacccccctctgccccggatgtcagtcatttttgggttgcagcttacccactccacactgacatgcttggtttattctctgcctgcccatccaggctgtgagccaccaaagtgggagcaggtatcgttccctcctgaggacccttgggcctactgcagggcctggctcagcaaaggcaaaagtgagtagtccaggagtgggtccctgccctggctgagtctgggcatctgtctgaccctgtacccatgacctctgtaagccaaaggtgtctatagatccctctgtcccctgtcccctccaaatctggccacttaaggactgtctttcttgctaaacccctacagtgtgctctggctggatcattgctcgtggggcatcccttcctttctcagcagccagcgtgccttcctcgtgctcattccacacctgcctccaccccacagaggagaggctcggccacagccatggctgaagtgaggaagtttcaagtccatcagggcatgctcctcacactcacacatcacagacggatgccttctttgggtaccctgtgctaccagcctcatactcactctgtcccgtgcccttgctcttttagcatttgggacatacagtagctttggagctgctttgcctcctcctttcccttctaccctggttcagatctataaccatcttctcatgtatttcccacaaatgccagtcaagggcgccttgggcacagggcagactccatcccagagtcccccaaggttctgcttcctgattcattttttttttctaatcacttagttctacctggagcatttaataacattctgtacagagcatttacttttccagtgttactgcttctctcagcacctgtcaagggaagctcttctccactggcccacagctgagcaaatccctgagcaaagactttatctgacttgccaagaaccaccgagccattcagtgacactcaagcatagagatgttatgctaaaatctcctgtctctcaactatgggcaccttctctggtctcatggaaacaaggacagccttggtagaaagaacaacattacatagcaagggcacattgtgtggcatatatgtatagtttgatgcttaaaagtactgtcactagagtgagactgacctcgtttcaatccagttcacctgtgtcttagctgcatcacttcgtgcaggttagttaacctctcggggtcctagtttccttatctgttgcatgggaatatcaccttgcaacactgagaagataaataacaaaaagcttaatgcaaggtccagcataaatgaagtggcaattatcatgattaatttaaagaaaataaccatatgactgaattgacctaattaaaacagaaacaggaattggaagacaggtagagcaaaagctacctcttccctgtcatccctccgggagccccacgtctttttcctctgctcttccccttggcgcagctcctctaagactccctcccacctgcagcctctacaacttctcccatatttactttcttgaggagctcaagtgcttcaaggtttcaactcttgttgttgtcattgctgattaaattgcacatatatgatctcctttctcttcccagtttctaggttcttcctgtctatgtcaatgtttcccaaaattgtctggtcataaaactcatgggggtagggagaggacttgttttaaaatctctgaagcccaggtttgctatgagtgcaggaatgtgcaagtttaacaggtctcctagagcgagcccaccaccaggcaaggctgagattaaccaacttgttgacccgagcaatcatggtctccaaaccccaaaccaagttgcatgactgacaaaggaatttgcactgttttcttttgtaacagcaaaagcagaggggaagaaaatgtgaagcccaaaacaccagaatgtcatatttctatagcttatgaagacagcagggcactttagatctttagaaatacgggatctttagaaatatgtgatgttcgtatggccaccatatatgcaggacacctctactgagaatcacaagatttaacactaaatgtgcttattattagttagaacacctttggctatgaccggtatgctataacaatatagacactgccactcatttagcaagatgtctaaaagtaggtggtcccaggagagtgcggggcagctcagcagtgccatcgatggaggacctagcatcttgtgatctttctgccctgtgcttctcagcacactggcttttcaactcaaggctgcaacacagatgggagctgcggttccagcatcatcccatcatttcacaaacattttcaattcaggaagaagtgccaagccaacttgccgtattctcttttgtaaaaacttgacaggcagggaggggggcagattctccctaaaagcacttgcccttgtgccttagtgggtagaactgagtcacaggcccaccactgcaacactcactagcaaaagagaatgggattatttagtttgctttaacctaatcatggttcatccccaaagctcatctccactgagcttatttctagaataaacatagaaaggaggaaaaaatgactctgaaacaggaaaccagtggatttaggaaaatgcacaatatcacagagccagaactcaaacttttgtaaatctgtttccagaacctttatgccaactgattccagctacatacaacttcacttccaaacaaacccctgtatgcttgctggccttccatcaaagcaaagttattcttactttgtactagattgctatgttacatccagactcttaataaaaacaaactaaacccaaacacctactattgccacacagagcacccagtggcctcagggttcggcagggtggcagtgaggagttctagcaaagcttctcccacccaagtgtggaccctcagctgaggaggctggtcttggctgtgctgttccatttgcacgaagatcctgatagactcctccatctttagattgcagcagctgggggttatcatagattttctcttccaaaaattaaaaaaaaattatcttaaaagaagcattgaatagttatgagatacatcataaaaatactctctatatgttaattattgaataaatgtttatattattaacttatctcctatccccttccacaagtgatttggagaagcttttaaaaatatagtcaatctgagtaagattagtggagtgtatcaatgtcagtttcctggttgtgatattgtatcatacttatgcaagatgatatcattgggggaccctgggtaaaagagacagtggatctctctgtattatttcttaccacctaatgtgaatctacaactgtcttaaaataagcaagctaaaccttaaaaaataaattcctcatcaaaagagtaaaatatattcctcatctcaaacatacatcatttctttgtgttgggaacactcaatatcttaattctagctattagagactatataatgtattactgttaactgtagttggaatcctacaatgggatagaacactaaaacttaccccttctatctaaatggaaatgccaattaccctgatccgatctctataacattacatatattgaaacatcactatgtaccccataggtacaattattatatgtcaatttaaagctaatttgaaaaatgttgtaattaaaaaaattaaatactaaactataaataactaagcatatcacagcaaaagggaaagtgggtagcaaaatggtaaatctgggagttagagaaaagcagaaatgcaagcccacagctctctgcagttgctagcagtgatctgaaagtttgatctaagctttctatcctggtggccaaagacggaatcagttacaaggatctcagtgttcataagatattattctaagccagggtcgctgcaggtggctgcaattctgatactggaggaatttgttccttagatccctttgcagttctgttgtataacttatgcagcaacactcctacaagagataacaaagaaaaattcacacaactattttttaagtgttcttgaatatatatagatagtggaactccttggcataaacttcagtggggaaaaaaggcagttttctaaagggccagttaatttcatcggtgggtaatgaaagaaagtgttgtggtgtaatttggtcacccttctgctatcgttacctggtgatcactgacgaacatgttcatcctgacactgcaatacatgtccttcaggaccagtgtgcaaaggcatctcttcaatacattttctggtgtcttccttttaagcaaaaatcaactacttgcaggcaacccccaacccctccccttcctctccctcaatgccatgcccaacgccactccctggctgcatgaccccaaatgcaacttacatgagggaccagacacaacactgggggaacctctacaagtgcctgacccaaggaaccactccagagagcacgcaccgagcagctgaggccacagtggttctgggctcactgccaagctctctctcacttgtcagcaaaagcaaaattgggatttttttttttttaaacagcccctggccaagtgtttctgtgctgggtgttactttgcttcagataggcacaaatccaacctctcctctggagcacaagctagagaaatcaaaagtttaagaaataccttaaatggctccatacactcaaaccatgctggttggtgcagctcaaaaggcaaagaattcaaacatgtggttcctaacctcacagagctgattatctgtccaaggccaggggtagataaagttcttggagaagcagcagagaactgaatcaaatgaaaagcaaaatactataaactcaaggtttaagtgctgggtttgagggaacaatctgggaaatatacccaggaagtgggctttaaattggtcttagaaagaggacttctacagattgtcagagaagagagagtgttcctcgcgtgaaccacagctgggaaaaaaaaacatgatggtggaaatttaaattcatccttgggggacagggcactgattgacatggttggcacagcaaggccacggggggaataaatgggagagaaagtcagagagggaggaccagctaataaaagtctttgaatactacactgtggcatttagaggattcacaaagaatgacttcagcaggtacatgccagccagcctaactgaaagcaaagacaacagaatgtctcatgcataaaaggttctctgcctaaattatttttgatctattggcacatcttttatgatctactaaaaaattaaatttttcattcatctattgtattcaacaagcaaaagctgcaagcccagattattaatgatgtcagatcttgtattcctaaaacaaatgcacaacagttccatttctgatgacaaaaagagagtcatttgtttcaatcatggaggacaatcttattaaacatcgccaacctactgccaagctggctgctcaccagtgcacagctacagaacaaatggaatccggaggactgtcaatcttcagatagtgtcactgcccccaaaataataaacttagggggagataaatctgttatgacttgaacacttttgcttcttaactctggagtcttcaagttcagcaatttcataattctttcatgtggcaataaggctgtttggcaaatgctagtgagaattgctaaactgagcttacctgcatataaaccttatacacactcatatcaactgacttaccctttcaggaaagtaacttagtaagggaaataataaaccttaataatatgcatgccttttgatccaataagtctgtttctcagtctaaggaaataatacagaatacagaaaagacgttgcacttaagaatgtccatacattgttgtttctaatggccaaaaaataaaaataaacattgagccaacccattttccaatagaaggggcatgatttaataatgctccaggcctagaaagaaatgtttatggtgtaatgttacatatatactatgccctatatagtatgatatcaagtatatgaataagattcccagaatgaagaataatcaagaaaagcaccaaaattttgacaatcgttttgagtgttgagattttatgtacctgtttatgttcttctttattctttgctatattttcaaaactttctcagtgatcatgtatcacttttaaaagcaagtagaacacaagaacagaaaaaccaaacactgcacgttctcacacataagtaggagttgaacaatgaaaacacatggacacagaaaggggaacatcacacaccggggcctgtcagggtggtggggaactagtggagggatagcattaggagaaatacctaatgtagatgacagattgatgggtgcagcaaaccaccatggcacgtgtatacctatgtaacaaacctgcacttttcgaacatatatcccagaacttaaagtataattttaaaaaaaaaagaactatcaaaacatttctcaacaagttcctcttagaaggcctatgagctgggaggcaccagaaggaatgaagggcaaaggtaaggagggaaaacaagaagtgagggaagttcctgttgccccagaaggagaagcatgttccaggattaccaaaaagagggattttcaagggaatgaggccagggttagcgtgtttccagggtcccagaataggcccagctcccacccagatgcccatgaggtaggagacattaaattaaacacacacacacacacacacacacacacacacacacaccccactgggtgtagaaggacccaaaaagaagaaaggtttatgttccaattcttacttagaattgtgggagaccacttgggggtggtgcccaaaggtaacatgaggtgatcccagtaaagtagaaatgttagagtaggatctggaggccctgaaacagccaccaccccagatgtccacagcctgagaagcaaggcacagaaagatccagaagttgccatgagcctcagtggtgaacaggtcaatggactgaagaagcatagagtgcagacaaggagggaccaagtgatgacactaatgaccaagtagcctacaggaacgtcagacaaggccagcagatgctgcaacacacccaaaaccataaggggtctactatgttttgttcagtttacccccagagcctcaagcacgcagagttaagtaaactatactcctagctaacagctaatgacataccatcagttaatggtgcaatctcctcattagtttctgattgattaattgccttttattcccgttcccataaccatctctctctcttgccatgggcatgcactccattgtgttttactaatttggatgtattcttgagatttacgtagttttcatttgaataaatggtaatatgctaagcaatgatggtctgtttttttgtttttttgtttttttgtttttgtaagatggagtctcgctctgtcgcccaggctagagtgcagtggcatgatctctgctcactgcaagctccacctcccaggttcacgccattctcctgcctcagcctcccgagtagctgggactacaggcgcccgccaccacgcccggctaattttttgaatttttagtagagacggagtttcaccgtgttagccaggatggtctccatctcctgacctggtgatccgcccgactcggcctcccaaagtcctgggattacaggcatgagccaccgcacctggcccctgatgttcttttcttcctttcttcactcagcactctgtgtttaaggtctagtcattctgatgtgtgcacgcctactttggtttctgcatattttttcttgatttatgaaactttccccacagcaacaaacacctcagattcagtcaactccagcacaggcacttctgcaatagatattcttttgcatgttgtgttatggacccctatgagaatctctctgatatttatcacctggactggaacttaagagacatacctgctcaacctaaggcttgtttcttgcctttaaacatggttcataagtcttcacttctatccacaatgcttgaaagttgcagttttcccaaatccacacccatgcacacacacatatataaacagccccgtgagagacacagagtgcattgcccgggtgccacttcaaggaaggacttgctgcccagctgcagggagtgtggtcaacaggcggcctccagctgttagcaactgaagggtctgccttgactgcacaacacgtagtctttaacctcctggagttgattatctgaccaatgccaaatacagattggcccgaggtttcacccctcccagggcagcttgctgctgggggtataatggccagctatttcagccaggtgcccgcaaccctgaagagcaacctccactccaactccttttgggttgagtgagactttgtcctgctacatcacatctctacttctcctgccagtcttgcatcctccccactctcttctcagctcattccaaataaacaccttaagccaaaccttgattcagtgtcggctcagtttgtgctctgggagagcccaggctacaatagcactgctcaacttcttaattttgccaatccactgtgcagaaaatggcatctcattgtattaattttcatttcactgcttcctaataatttggaacacttattaatataaatgttggttgttcagtgatcccttcctctgaatttatttgttatagccattttcttagattttgtggcattttcttaatatgccttgattccttgatcatcctatataagtttttttgttttgttttgttttgttttgagatggagtctcgctctgtcgcccaggctgaagagcagtggcgcaatctcggctcaccgcaagctctgcctgccgggttcacgtcattctcctgcctcagcctctcgagtagctgggactacaggtgcccaccaccatgcccggctttttttttttttttttttttttttgtatttttagtagagacggggtttcaccgtgttagacaggatggtctcagtctcctgaactcgtaatccacctgcctcggcctcctaaagtgctgcgattacaggcgtgagccaccgcgcccagcctctataggtatcttttatacacatatactgagtgacgtgattacaacagtcaagcaaattaacactatataagacttcctggtttaagaagttgcaaatatcttctcccaacatacaggctattaactttgtctatgtgaggtctaacaatgaatcaaaattcttagctttgatgtgataaaatctaccaggcttttatttttttttgtaatattgaagtctttttctcttttttgagatggagttttgctctgtcacccaggctggaacggagtggcaagatctcagatcactacaacctccacctcctgagttcaagcgattctcctgccccagcctcttcagtagctgggactacaggcgcatgctgccatgcccggctaatttttgtatttttagtagagacggggtttcactatgttggccaggtttgtctcgaactcctgacctcatgatctgcccgcctcggccacccaaagtgccgggattacaggggcctaatattgaagttttctataattattctcttacccctaactcgcgaagatattctacattttttctattacctttatagtactatattttatatttaggtttttaatttatctggagctcagccttgtatatggtagtgaacacaactgggatgcagttttatttacattcatatggagaggaagttttcttagtagaaataaaggaaaaaatagtgataccaccaaatggggaggggagaggtaggcaaggggaataacaactaccggcagaggcatattatttaaagatagggagttaaccaccagaagtaactaataacagcaaaaacagaagcggttaaaggcaaaggcctccagggatggaggaaggtcggaagttagggaaaggggaaggcagaggctggaacatccttgtttctcttgtattacctcagtaattttttattattcttacttaagttaaacttttaaaaaatcacacttgttatgaatccttcccaagagatctctgatttcctgagtcagagaatcatccaagtcccacttattccccacccatccattacatgcactccttttcgaatgactccccaaatacatacaacagcatagacacactttatgacacctcagggatgggaatcagcccaactgagatagagagtgagcggagggtccccagcgggtgatgaagccacaaggccagtggagatagggtttgcaaagagtctgtgggtccctttcattttcccacagcagatgtgttcttgctgaaaagggaagggcatagccctgagttattctgcagtaaggtatctgtctgtgagtatacaccactctcatcttccccctaaagatagtttaaaatagccctgtctactgtccagcaagttcaaattacccagagccaccgtatacaattgtataggttctagatgtgaaggctctaaaaatgccctaaagctgtgtttctggatgaggcatcattgtgctttgcaaacagcactggactgggaatcagggagatgcattttgtccactagctttgaccatgaaccagtcctccacctctacgagcttcaatttcctctaagaaaatgggttaccagatagtagtttctaataccccatcccattttaaccacctatgattcaaactatgattatattcctggagaatctcatggtaccaaaatatttcagaaacatgttttgaatccaacaagtatattccactgaaattgatgacaaggcaaaaatctttatttgcgcattcaattgtccttttaaaatatgtcctttaaatgcattaattggttagtaaataactgaaataatttcacagtctaataagtgcacattagaatccaacacagcttctgagtgttctacttaagaaaagatgaaaccttaacatttttatgattcttagacatttataatattgccagttcattagatgaatatattgccatacttcatgactgttcaaagttttgttatcagcccaaatatttgacattctggaaagtgagagacatctctgtgggctaaccttccttcttgtgttcacacagcatttcatcagacctatataaaaaaatcagcacggcattgtggtttatgcctataaccccagcaatttgggaggccgagatgagagcatcgtttgaggccaggagtttgagaccagcctggacaacgtaacaagaccctgtctctacaaaaaaaaaaaatttaaaattcagcctggcatggtggcatacacctttagtcctagctacttgtgaggctgaggtgggagatcacttgagcccacaagtctgagactgcaatgagctatgattgtgcactccaacctgtgcaacacagagagaacctataagaaaaaaagaaaaaaggaagaaataggacatgaaggaatgaaggaaggaaggaagagagagagagagagagagagaaagaaagaaagaaagaaagaaagaaagaaaggagggagggagggaaggaaaagaaagaaaggaaggaaagaagggagggagggagagaaagaagaaagaaaaagaaaggaatgaaagaaagagaaagggaacgaaagaaaggaaaaagagatagaaaagagagacagagacagagaggaaggaaagaaagaaggaagaaagggagggaaaagaaaagcaaagaaggagaaaagagaaggaaggaagaaaggaaggaaggaaggaagaaagggaaaagggaaaggatggagggaaggaagggagggagggaaagaaagagaaaagagaaggaaagagagagagacagacagaaaagaaaagaaaaaagaaagaaagagaaagaaagaaaggaagaaaggaaggaaggaagggggagggagggagggaagaaggaaggaaagaaggaaggaaaagaaagagaaaggaaagaaggagggaaggaaggaagggagggagggaaagaaagagaaagaagaaagagacagaaagagacagagacagagagaggaaggaagaaggaaggcaggaaggaaggatggagaaagaaggaaggaaggaaggaaagaaggaagggggagggaagaaggagaaaaggaaggaagaaaggggaagaaaggaaggaaggaaaggagggagggtgggaaaagaaaagaaaaaagaaaaggaaggaaggaagaagagaaagaaagaaataaaagaaatcttccatatttcctatagtgtaagccaggtaacagcttccctaagcccttctaatcatttgtcaaatgcacctggaaaaatcccacaccttgatgactgaattttccattcctggctaaagaaagtcaggagagccaatgtttgttttttctactgtttgtagaaaaaaaaagtgtatggttttttctaccccgcaatgctccctgttatgggatgtggttggtgtcccagtgtacatttgaacaaatgattggttattttatatgtatcagtatattatactttttctaaaaaaaaggagaacactacaatatgaattactgaacatatctaattaagcaatctaccagctgttggacatttaggtcattccagcttttcctttctgaacaacctaacgatgagagaaccaaaagcttaattcaaatacagtcagaaggaaaattctttcagttgaaggaatgaacattttaccccaccataatatgtaacaaattttagttccatagcaaaaatagaaaattggagttctttgctgatgatgggaaagaacaaaaagacaacatccccttgtggttcagagtgagactgaaacctgcaaagggaaggagaatcccctaaaaatgggtgcaggaatccctaccctctctttctctcctcttgttcattccccttcttggcctcctctgcctaagccagagtcagggacttgtgtgttccccacagagacttgcaccaggctaccatctggccctggccctggcccagtgggcactaattatcctcagtcagcagatctggcatctccatcttgacatgtgtcccctcagtccctgtgtggtaattaatgatgtggaccacacttttcttctgaaattgcgccctcctcttctggcttctaggagaactctttctaagaccattctctgttcttcccatcaccaaatgctgctcttcaccacagtgctttccctgactttcttgacagcttttccaggcgaaattccatctttcatagggccaaaccttagccacgtgatgatgactccaactgaattctctatagagttccaggacaaaattttcagtttctaattgtatcttctccatcttgcattttaaaaatttaaagacattaatttccatcctgattccactaaaaagaaaaaaaattgatccctttgccaagttctttcaattaatgttaccatattatcccattcatttgggtttgaaatctcatagccatctttaactcttctttattcctgtatctaatcagccaccatctcctttcagttctatttccccaaaaggatcacattttgattacttgaggctgaattaaacatggttgaggctgagcagtgagttgggacccctttacctttccagctaagagcatttgttagccaactgtcaagtggagaagcaagaactccgcaagcagaagagctgcgtttgatgtaagcagggaagagagatcagaactgtttggcctccctttctcagcctcctgcctccaccccaagtcacatatactcccaagacctgacccattcccaaaatgaatgatcagcattcgtccactaaccagaagcatgtcccagctctcttctgtgtcccaccattagaaaatcaaaagctgactgtagctttgatttagttgcaattaggaattagtatcttcttcttcactaccaatttctcccagttaatggaatatgaatggtaattccagaatcttttatctcctttctgactaccatagcccctattcaaatcttcagcatctcacatctagatgactgcagaagtagcctactggtcttctctgcttagagtcacattccaattcagctcccaccttgcattattctaatatacacccttgatcatattgtgtctcgatcaaaagcttcaatggtcaagtactgaacattgcttatatatcactgacattgctagtattcctgctataacaagttctcccttattcagaatccatttaaaatgtagtgcaaaacacacacaaagtgacagtaacctaagtgcccaccaataaggaattgttaaataaattctagtacatccatgacatgagataatagcatgtcgtccatcatatggaataataggaagtcatttgaaagaacgagatgatggcagccgggcacagtagttcatgcctgtaatcccagcactttgggagaccaaggtgggcagatcacgaggtcggcagattgagaccattctggctaacccggtgaaaccctgtctctactaaaaatacaaaaaattagcctggtgtggtggcgggtgcctgtagtcccagctacttgggaggctgaggcaggaggatcttttgaacctgggaggtggaggttgcagtgagctgagatcgtgccactgcactccagcctgggtgacagagcaaaactccatttcaaaaaaaaaaaaagaatgagatgatggcatacaaataaatctaccacatatattctttgtttttatgttttataggcaaacaaacatttaggaagaacacacatcaaacagttataaaccgtagccacctgaggagtgagattaaggggaaaagagggcttctgtgtttattttgtgattgttttgtaagcgtctgtgttcttaaaatatgttacagcatacgcaggtattatttttaaatatctaaagccaataaaggtttataaacgcatttgtcatctaagagcttcatttagaaattatcactatatttttatttgaggtacattaacatatgtgtatgtataaacctaagatttaataatataatgtactcactagactgtgttcattaaaggcagagttggtatagtcaatttgcttttttattttcccagaatgtgtctcagaatttatatagtgcctggcatattagaagagacgtgtgtgtgtgtgtgtgtgtgtgtgtgtgtgtgtgtgtgtgagtgagatttgctacaaatttctctaacttcatagaatatgatggaacatgtactgtgattctagaatcatttctctattgctatacacaaaccatatatatgacagttttgcatatttgcaaatgcaaatatatacacaaccaaatgggagaatgatctgcatattgtcattgtgctgacaaacctgtcttgatcactgctacggtgactccaaatcactgagtgcttcgaaaaggacaagaggaattccatacggaataggcaattaggttttggaacaatgtgcacaggctggtgttaactggttcccgtgagtcagggccattccattttggggattaaacacatcagcagaatgcccctttctctgcagctgacaagggggagttccaccccatacactgagggagagggtccccagaatcttccggggagtgaggaaacaaattccaacccccaaacaacctgattggaaagggagtgtttttatatacacatgtctccgaaatccggccagcaaatgataaacatcagctggtgtttagctaaatgttaaaaatcttattgaggcaaaagcaatgctagaaaggaacaacaacgaaaaaagccagctcagcctctgccccacggcctcgatttctctcccaaatcccaggtagctgagaggtggaaagtctagaaacagaatcgaacacgtctaatctcttttacaacaatgttcttattttaacccatgtcatcaggggaaatggctgaaaatagtgacaaatacaacatcaataaacataataataattgatttcccagagatgaaaaatttgaaattattggccatttccccctagagcattggttgattaatttaatgttcatcttagtctttcaaagacatcctcttatgttgatctgctttgccagactttgtgatgggttttgcggtttagggcccagtggttaaagtatattgcacagttctgcagttttaaagagaattctgatagtttaaggatgactgcagccaacaacagcaacaacaaaagttaagacacatcaagcaattaaatttccagagattggaactggagtttttcatacaggatataagttcagtggctgtactactcagtttttctagcttaagtatccaagaaacagattttgagaggtacaacctctattcccccagagcacccaactttcacttaattcagaatctcaacacagagcaaggtgaatttcaagtaactattttccttcctctctcccttctttctttcccttttccccttcctttctttcttactcatgtttctcccctaccctctctcttcctcatttccttcttcctttctttcttccttctcatctttaaaccacttcaaagtttgatgtttgtatttatcctgagagacaagtgaaataagcattattatcctttttttacagataaatgaagtgagacacagaggttcagtgactttctcagactttcttgtgactgaataaacagcccagggaaagaagttttgaacctcctgagttccaggttagcactttttcttttcattttttattatactttaagttctggggtacatatgcagaatgtgcagtttattacaggtacacacgtgccatggtggttcactgcacccatcaacccgtcacctacattaggaatttctcctaatgcaatccctcccctagccccccaccccccaacacaccccagtgtgtgatgttcccctccctgtgtccatgggttctcattgttcaatttccacttatgcataagaatatgtggtgtttggttttctgtttttgtgttagtttgctgagaatgagggtttccggtttcatccatgtccctgcaaaggacatgaactcatccttttttatggctgcatggtattccatggtggatatgtgccacattttctttatctagtctatcattgatggacacttgggttggttccaagtctttcgttagtactttttctacaagtagctggtcccagagcatgtcagggagaactccagccaatcccatcaatcacagctccgtccatcaaccctgtgagcacagactgactcttgcatggagtcagcatctgggtgtgcagaggcaccttcacttcttgtcccttcccaaatgccacatcactagaagtatctactttatcattttgaacatgtaagagtaaacctgcttccacattcttaggaactaggaatgcatcagacctctttatcagacctcatctgcacaggtgagcctaaaccccttgttttggaaatgtttgatatggctcctggcactgggtgcctggtcccttccctttagggtttcccttacttttcctgggaccattgctatgcagtgtaatttctcctgtcttcagcccctaagacactcggcctagtatccttgtccccataagtctaccggaggatggtgatttccactgtctcaaatgcatgcactttgacctcacactcatttttctgcaccatctcagggtccctaccattgtacccaggaggtataaaaaaccttctgtgaagacatatgtagccttcaattaaagcatttgtaattatttcccaggacagttattcatctacaaactcatcgtcagtggatttacctaaggaaagcaaacaacaagaggtaaatcagggactttcatgaatgcaaacagtcttccctgtgacatcttgcacagaataactctccctaaacaagggtcaaggtgagatggcagcactgttaagtcattaaaggccaagcttcctaggtcatgtcagtatcacgcatcaataaaggactctggtaagtaaatgaagccatttctctaaggaataaaaaaaaatcatcacttttaaatgcttaagaatgcattttgtcaacactttttgattaagatacagctttctgaaacatatgagaaataaagtaaagaaaatctcttcctttcctttccaaaattctgccttccagagcagttgaggcagagtgatgctgggaatataagaaactcacagaaacagtggggagggcagagctggggaatcgagttagagcagcagacacagcctgtgtcactgagccatggttccctgcacaggccccatttataacctggtctttaactttgtttatctttgtggacattcgcagaagcatcttactttccagaagctggggccctataatcattatctgtctttggagaaaatgggattatgtgcatttaattgctcttctcagaaagtcgatgttgtaatagatcactcttcactgaccctcttctccaggtggggcttctgggttttcacatttttcccttggccttggtgttgtaaaaaaaaaaaaaaaaaaacagtaaaggtgggcttcttggtaccaaacctcaaccacaagcagaaaggaagtggagaaggcttaccatcttctttagtgtctgagattgaaaacccccagctgtcctaagaatgaacacctgtttatggaagtgaatgcaaattgtggaggtttccaacctgtgtgcatctgccagggccaccacaacaaagtaccacagactgggcagcccgaaccacagatgttcatttctcaccgtcccagaggctggaagtgtgagatccaggtgttggcaaggttagctccttgtgaggctgtgtgggaaggctctgttccaggcctctgtcctgggcttgtagatgccatcctctccctgtgttttcacactgtcttccctctgtgcatgtctgtctctgtgtccaaatttccccttttaccttttagtgaggacaccaatcactaggttagggctcaccctatagacatccttttaacttgatgacctctgtaaatatcctatttctaaataaggttacattttgaggtactaggaattaggccttccaatgtgtgaatttgacagggaatcattcaacccgcaacacagctcaattaaattatcccaggtttcagacagaggatggtttggggtgaagaggaccgtctccccaagtttgcagcagctgtgcttttcctgtccgtctcttgtgtgtgatttcacctccgcagtcagctttcagctctgaagggcaatgactgagggctctttgggtacatagaggtgagtcgttctgataagactggggaagatccaagaagacccctggatgtgccagtggactctgaacgttttgcttggctaagttctgatgtgacgtccccgactgcaagtgtggcatgacagaaaccaaggggtgagtacggaagggagtggtcaacaaagacatccatcgggacagcaattaagactcagagaggccagccatggtggttcacacctgttattccagcactttgggaagctgaggcaggtggatcacctgaggtcaggagttcaagaccagactggccaacatggtgaaaccctgtctctactaaaaatacaaaaattatccaggtgtggtggcatgtgtgtagtcccagctactcagggggctgaggcaggagaatcacctgaacccaggaggtagaggttgcagtgagccgagatcaggccagggtgacagagcaagactccaccaaaaaaaaaaagactcagagacagccagctgtggttccagcctttcatctaataccatgtttggctaacactaccctccctacccttcctcctccctacttctccccagacaaaagcttttccttcttggctgcacacatttaccagacttcccaatattctggcctaagctgtgtctcagtgctttcctaagtgtaaaagtttcttatggctgctgcaccaaattaccacaaagttagttacttaaaacaatacaaatttattgtagtatagtttcagcacccagaagtctgaaatgggtctcactgggctaaaatcatattgtcatcagggctgcattcctttctggaggctttaggggagtccctgtttccttgcctcttccagcttctaaaggctacctgcattcctcggcttgtggtcccttcttccaactgcagtgccagcagcgtagcatcctcacatgtgtctctctaacactgaccttcttcttccacttatgagggcccctatgacaacttccatctgcaactttaattctccccttcctatgtaacataaaacagattctcggattaggatgtggacatctttttagaaggcagaggggagcatcattctgccaaccatactaagcgagacaaattccttcctacaaggagttccagtgacaactgttatgagaataaggtgtttatgtcatgacataaggactgaacgtttccactggggttttgtttgtcgttattgtttttgttttgatttggttttttgaaaaggggtctcgctctgtcatccaggctggagtgcagtggtgcgaacttggctcactgcaacctccgcctcctgggatcaagtgatcctcccacctcagcctcccgagtacctgggactacagatgcacaccaccatgcctggctaatttttgtattttttggagagatggggattcaccatgttgcccaggctggtctcaaactcctggggtttgagaaccccatctggggtttttgaacaaaaacagaacctggttaaggacagtttggaattcagtgaaccaaaacatgaaggaagaatcagtgaatgagaaagtaaatacagataatacgtgtaagtatgtcaacagtttttaggaaagtacacaggttattaatcttagagaggagagcaagcaccagggaggggtgagcgaatttgatttaagtcttaattatagattgtgcaatctccatgtccaaggaatcaaaattcctagctccatggatcctcttcccagtccacttgccaatcagctttctgaagcaatctggcacaggaaggagtgggagactgatgagcagcccagaccccctgctagctacattgcacagtccctggaggatccttccagggagttgggtctctatagagtactcccaaatcaatcaactccctttagccaatctctgtgctgagccccatggtacagcacccttgggatccagcctatgcatactctccaagccctgctggttcacgctacctgggctttagagtgctttaccttcaattatggggcccagcacagcctccactggggcatgctgtgctataaccatagtgataggtttaagggtcaaaaggggtggtgtaggcacagactgaggagatgattctcgttatcttgcagaggagaggtctctgtactatctccaggctagaggggagttctagctcttcccaggaggtgtgggctccttttgcaacttagagggctcaggagaacccagagattcaagattttaatggcatcaacacagattcctctacccgagcagagctggggatgaggtgaggtgaggtgagggaggcatctaggggacaaaatttcaggacttacatactccctgcacatgcatggacctgagagtgaacacctccttaaattttgcaccatcggcccctggcttgcctcaccctagctgctgccttgcatctaagtgtcaggtcctgttctcttccaaccaggaacctgactttggcatagaatactgaccttgcttggtatttaacctacttcagcaaggaccccagaagactgcataaattggctattaggacagagtctcaaagcatgagaaaagtgatgtctgaacttagtgaggttccgacgccagagttgctgggagcaactgcagggaacaagctggagaggagatatgacagaagactcccagaaaacccaccagatcatcacattccatgggaagtcccctgcagaaactgtctggatcctggaggatgatgatagaccactcaaactcaactaagcagcagccattttttccttcaattcctgacatgacatctttgttggagagatgaataatgtctcagggacattctacacagccattgatttggtgaaaccattcctttctaattctatcaaaaaagaagatcagaagctatttgcaatgaaatagaaagaataaaaaatattcctttacagttttgccccaggactatgttaactcttgcacctttggtcatattatagtctgtggagatctggacatctctacacctgggcattccatagaatgtcacactgatatgtgatatagatgacatcattctagtcaggtcaaatgagcaagaattgacaagtacattgcagaccttagtaagatacacatcttccagaggatgacagataaagcccatgaagattcagaggcttgctacatcaataaaatgtttaggagtccagcggtcaaggggtatgccagggcaccttatccaaactaaaggatcaaatattgcatcttgcatctccccccatgaagaggaaagcccaaaggtgaacccaaggaccaacttataatattctccactagcaatgatcattctaccattagcaggagaggggattaccaacagtgctaggttttctgtataaataaacatttgttgaggctctccaaagaacattagcaacaagaaagaacagacaacacaaaacataatcaaatttccaaggtagtacatcagttagctattcctgcataacaaatctaaaacttaagccactaaaacttagtggcttaagacaactaccatttgcttagctcgtgattcagtcagcaacttgatctgggctcatttggatgggtaccatgattttgcctgggctcattcacacatctttgctcagctgaggagtcagctaaggattggctagtttggggtggcctcagctagaacatcttacctttgctttatgtgtttgcttatccccagcaagctactcttgtcttattcataagatatctgggcagggttctaagaaagaatagtcacatgtaagacctcttgagttctcatgctaggctcacaaagggcacaccatgacttctgctgaattctattagccaatgcaagtcacgggccagtaacagattcaaaggtagaggaaatagactccacctcttgaaggaaaagttgcaaagtcacattacaaggaacatggatacaggggaaagtgaagagttgtggcagtttttgcagtctattaatctgctggattctgtatgaattaacatttatgggagcttccaaagaagagcagcccctgagagggtgagagaagtaagagcctgatcaaatttctggaccagtcttttcaaggcaagagtcagaaatttctaaacagatttgatgaccctccttagaaacgcagcaggacaatgtggccccagtcaatccctgacctttctctgtattcaatcctaccctctgaagtgacctctgtgtgttccctgtcctcttttatagtcaacttagaaatgactctatcacttctgccttcagaacagagcaacatactgaaaaaggtagacaatgtgttcaaaaaatgggaacaaatttctataatctgcctgtcaccctcctgcatgatttttaatgacattctttgcttcaaaggaaaataaaaataaggaagtaatctgacatatatactgcacttaaatgctagtaagtcttcacacacaaagaaagaaatagtaagaaaagagaaaaccctaaaaatattgaggttgggagccaaatgcagcatatgtttttgagaatctaatccttccagtgaaactcccagacagctgtcagagtgagttcagtggtgcggtggatgaggtgataagacatggtactgtgtaaagctccaccccaggcttcatcattggagtgtcagccatcatccttctcctttgcaaattggcatttaatgaaacaaagcacaatttcttaaatcccaaatcctatttttacttctatttgccaagttattttctctgcttttacttctcctgattttcctttgtctactctttttttttttctttttccttccccattaaggaacgaggattttcaagctttgcttccttatcaagctaaaagtccaaagaatcagaccttttggtttcccttttccatttcaagatatgatgaggtcaagtagatttgtaaggtagcagaggtgctctgttactcaatcatggctccaagaacaggaatgtggaagaaaaaaaaaaggaagtaataaggcctctccctgttccaacccctttaaaatgtagatttaagaaaaggtgctagggagtcaagcaggaggaactaaaagagctttttcatttaaaacactgagctcagagcttgaagagaatttagagaccttctagctgcaaaccaatctgatctctctaaatttaagcacatcccttcctgggctcaagaaaacattgtccacaagagcacctaccctgaggacaagtcttggatagggatcaataagatactccaaatcaaacttgccctaatgagctttatctattaaaaaaaaaaagaccaaacaatggaaggcagcatagcatggtggttaagagcacagacccaagacgtcatggatttgaatcctggctctaccagtgttatgggttgaatgtgttctcaccctccaaaatccacatgttgaagtcctaatccctagcacctcagaatgtgacattatttggagatagggtctttacagaaggtaatcaaataaaaatgaggtgattagggtgggccctaatgcaatataactggtgttcttatataaaagaaggaatctggacacataaacaagcacacagggagactgccctgtgatgataaagactgagattggggtgatgtgtctaaaagccaaggaatgcgaaagactgcagcaactcccagaagctgggggagagccaggaacagatcctccctcacagcctcagcaggaaccacacctgctgaccccttgatcttggacttctggcctccagagctgtgagagaataaatttctgttgtttaaagcacctagtctgtgctactttgggcagccctggcgaggtcacgcagccactcaccatctatctgtgtgactctggcatggcttctccttgccctgtctgtaacatgtagatgacaataaatgtctaagtcagagggtcgttaggaacactaattaaataaattaacatatgcaagtgtttcaaatagaagttgacgcaaagaaagaggtatatgaatgtattagtccgttctcacgctgctataagggcataccagagactgggtaatttacaaaggaaagaggtttaattgactcacagttccgcagggctgaggaggcctcaggaaacttacaatcatggcggaaggagaagcaaacatgtcctttttaaaatggcagtagcaaagagacgtgcagagcaaaagggggaaaagccccttataaaaccatcagatctcgcgagaactcactcaccatcacgagaacagcaacatggagataaccgcccccatgattcaattacctcccaccaggtccttcccatgcatgacatgtggggattatgggaactacaattcaagatgagatgtggttggggacacagacaaaccatatcaatgaatatttcttaaataaaaaaaaattaaaaccaacatctgcatgagtcattataggtattattagtgaatctgcttgactcttcagtcagtatggtattagagggaaaataagaaatcctttggaaagccaaaatgccattgcttattccaagcactgtctacaaattgttataatcagagctatgttgttttctttgtttttctttaaatcgtttggatctggcagtgcccaggcctttaggtttctaataaattattaatctaagagttaataattcaagttaattggtggtataagccactttctctggcaaatgtgagcaaaggtcacaactttttaacagcaagggtgaaaccttttctgaggttttttccctcccccatggtctatcatggaaatattaagatatgaaagaaaaattttaaccagagctgggaaagcaagataattccaaggataaaagtgtagactgtcagccatacttcctggccaagcactgtctccatagccctgctggaggaaaaggaggtctccagggaattcaggggactccagccccacaggagcccacccaagaaggacacagccatgcaggtttgtaaacctttgacaagacaacttataatcattaaacatgttgactcattgatcaaaaaagttttggttttttgtttttgtttttgtttttgttttcagaaaataaaagaaggcatttaagagattagctcaccaatgggatttttcacaaagaatgataattttcctaaattacaaggcacaggcttaagaatagagaacatccattcatactgggtgacagccatagaatgctaagcaaaccccttccaccactgacttctttgattttaattaatgtatatatgctctgcctttttgtttccagaaagaatttcaggtaattcctgattgcaggccgcagaagccaagaaataaaagacttcttacccgaactaatgtgactttactttccagctcatggatttgcccctagatctgtgaagcagccacaagtggcctagctgttctgggtgttttataccttttttggccttaatgcttatttgcaaggttcatgtcaagttacaggctgatgtgatgaaatgactttttcccatttggaaaataagattattcttagtagcttgtttcagtcttgattaaaagatagatgtaaaatattcaaagaatgatgtctgaagacttaaagataaaatttacatggaagccactagtttaaagagattcagtcagctcctccagctcttgtttttctaaagaaaatttgaatagcatatgcttttcattgtgctccttttcagccatttacatattggggaaatatatatttggcaactggtcctatttttaggagtccttgaaacttgccctttgaaaatgttttcatttttggcacatatgtgtgtcttaagcagaatgaaaacacaaagtaaaaaagaaaaatatgtacaaaaaggaatgatttttccagccctatgtagcacaataagaaagcaatcattcagtggtgactttaaaaaatggattcttgcctggattttccaacgatttccttctaagtgagcgtttctctgcagaactgaactaatgtaaagagacagtttgttccagtgccagaaatgaaccagcaaaaaaaaggacggaggctctattttcataggaggaagttaacaaaataatacccactctgtttctctgcagcctcttgtgtcatttcagaagaaagtgccatatgcccattgcgtgatttgaagcgtgtattcccagcctgactcttggtcaccactcgttctgttatttgcagtcagtaacaaagattcatccttgtgtccatcatgcaacaaggagaatctttgtcacttagtgtaattaatagctggaccttgcaaaggaaggtgggagaaggaagccgttcatgcatagacctggataaattcagaacaggctttgcggatctttgctgccttttgaccaattaaggtgccagagccccagcagaagaggaaatatggtaaacaaagtgttttctctggggctgtgtgtgttataatcccaagctctgtaactgtggttcaggagagctctctaactttccctatcaagccagatgaccatcgactcccctctacgtctatgtcctatttcagtgtatccttcccactttccttccaccacactgtcttcaccagcctctagatagataccactataggataaaaatcaaaaagagaggccttatgtttgatgagtgcctcccctagactatgtggttaaatcactcagcaagctttcagagaatgtgtaatgggccctgttttcaaaatgagaggactgaaaagaggtttagagaggccagcgctgaggttaggctcagggaacagatagaaatagccgattcaggaccacatcaagggctctctaatgccgggattcttagctcacttttccctgtattgtgatcttttctttcactttttttttttttaatagagatggggtcttgttatatttcccaggctggtcttgaactcctggcctcaagcaatactcctgtcttggcctcccaaagtgctggggttgcaggcgtgagccactgtacccagcctccttaactttctgaactcctacttatttatttttgtgaccctacttctttattcttcctcctcctgtacaaaaatggctggatggattccacttgtccctggacctttaaactcctgtcctccatacctgaacaaatccaatttatctctcaaagtttcagagagttcctaaatactaatagttcctcaccatcatctcacttgcaatccgtgcatttcagagttcccttcccagaggccatttttgcctttaattagcaaatgcatactattctaggatccatgagatttttttccttctatttctgcccaaggagaaagcaaacacgtactgctgcatttgccatcctaggtccataatctctctgatctttcttcacctttaaaaatctcacctcatatatcttttcttaggctcatccctcaaatattcaggttatttcccccaggcttcctctcacctctctccttgtggctacactggctaggagtgtccagcctcattcaagagggggtcggatctcctttccctgccctgttgctttccacggtggaaccagcatcctccctgactccctgcccctcctcaggaaccacaactccctgtcgccctcctctgaacaggattgttctccatccatcctcctccctgctcagacctccatccatagcactgtttctaaacctccagctccctctcccttatcccatctgtgttagcctgttttcacactgctgataaagacatacctgaaactgggcaatttacaaaagaaagatgtttaattggactcacagttccacgtgactggggaggcctcacaatcatgatggaaggcaaagaggagcaagacacatcttacacggatggcagcaggcaaagagagagcttgtgcagagaaacttgtttttaaaaccatcagaccttgtaagactcattcactgtcatgagaacagcacaggaaagatcggcccccttaatacaatcacctcccactggggtcctcccatgacgtgtgggaattgtgagagttacaattcaagatgagatttgggtggggacacagccaaaccatagcaccatcttttcaaggatccttttccacacatctcacagggtctgctcctgtcctagctggctgaacagtcatcctaggcttccaaagtattgccagtcaatgttcatagctctctttatccaatttgggaactcatcactgcctctgaaacccagctgcttcatgataggctgcagcaataacaattttggaggcccagcccctccatgagtttgttctgatttggggtgtgcccatttgtgctctacctaagctcctgaggttagggactcctgttagtcttagtgactctatgtgtataataaattataatgctacaagtgggcttaaattctaattccttttttttttttttttttttgagactgagtcttgctctgccgccagcctggagtgcagtggtgagatctcggctcactgcaacctccacctcctgggttcaagcgattctcatgcctcaggttcccaagtagctgagattacaggcacgcaccaccatgcatgactaatttttgtattttcagtagagacggggtttctccatattggccaggatggtctctatctcctgacctcgtgatctgagcacctcagcctcccaaagtgctgggattacaggcatgagccactgcacccagcctaaattctaattctttagatatgtagaaagcatagtcattccttccaagtccataaaagtgccttgcccacaacatgtgtgttatttttcaatccaaggcactctgctgaaagttcagaccagcatggcaagctgcgcaagcacaatttaaattcctaccacaccacaccattttggctgatgtgttcctaagtatttaagtcactgaacattcccttcttcccccccccaacccctctcacatgacaccaccaattttgccttaagggaaacctaaatgcagattcctgtgacctggagtggacaagatagagagttagttcctgctgtgatcctactatcttccatctgtagaatctaccagaaagtaagctaaaacttaggagcaatgggaaatgaagcaaggttgcccttaagcccatttgtctgccaagacctctctgcaagtcctagactgaattgccttccagatgtccaccaagataaaaaatgtcactacttcaggccaatttctttgcttcctccccacatgtgaaaccagacagagacctgggagttatcctggactccttcccttaaatgatccctcccgcacagtccaagtcctgtccatctcttgctgaacagatcacctaaagtcacctgagcctgtcctctgctctctatccccatcacatcgtcttcagtatagaattaggaatgggattgcagtcccttcactgccttttacctgcaccctaggagtatctacccttcaccaactctctgttgcttacaccatcaacttgtggagagctccaggcctgagagatggatgtgggggtgactggaagctcagttctcactcagcccctttgtcactcacactctgcctcagcattcacagcttaacaaagaccaatgcagccttccggtagacccataaatggaagctatcaggaccatggtagaagctgattcacattccataggggcatgcaaggttttccaagacccagcctcctctgagttttaatttgtagaaatactggactgcctgtagttccccaaactcaccagcctttgcacgtgtgctcccagcacaaagctgcttcccacatcccctcagctccatacaacccctccgcattactcatagaggaaaatctatttacacattttgcttgctcagatgcaacagcccctaggatggccttctgacttcaactacctcctccttatccctgtcttagtctgctctggctgccatagcaaatactacagacccaatcgcttaaacatcagagatttatcttctcacagttctggaggtcagaagtctaagagcaggttcctggtaatggctctctttctggcttgtaaatggcaagtcctcaccatgtcttcacgtaacctttcctcagggcctgcccacacagacagagggagatctctggtgtatctttctcttgtttttttaactggtgaccaatttattaaaatagttgacttaagtatctgcaatggtggcttcaacctcaagtcctcgctcaatactgatggaagtcatccgctcaacaatctcagaagggctgtgcgagtcaatgagtggcttgtggattttcatctggaaatgatcccatgtcttagaaccttcacctcaaggagtttttcttgtagtaattctcaaaagtcttggtaggcattctaactggtcctttcacttcgagattcttttcctttgctcctctgttcaagtcagcacacatttctccagagattttatgtggcagctcattagcgtgattcgaattcagcaaatcaccacctccagctccatgggtgtttttctgggatctttaaaagccatggctgcagtgcagcttcttgaccgacttgttcgttggcgagagtgaacagtggtgaatcaggagcaaaaagctattcttttttttttcccataggttacatgactaagttatttagtggtgatttgtgagattttgatacacccatcacccaagcagtatacactgcactcagtttgtagttttttatccctcacccccttcccaccctttcccccgagtcctcaaagtccactgtgtcattctcatgcctctgcatcctcataactcagctcccacttatgagtgagaccatatgatgtttggttttctgctcctgagttacttcacttttagtctctaatctcacccaggttgcagcaaatgccactaattcattcctttttatggctgagtaatattctttcctctttgaaggccgccaatcctatcagagtaggaccccacccttatgactgcattaaaccttaacctcctaaaagccctacatccaaacacagtaattcacagcttcaacacaggaattctgaagaacacaatttggtccatagcaacccataccccaattccctgatagaaaacacattacctacatacagaagaaaaatgactttccttgagtactctacaaattagtttgtttagtgttttattataaaagttattatttgcaatctatcttactataattgcactatgttccattattattttttgataagtagaaatgcaatatgtttgcaagtatgtgttttaattcgtaacttatgaaactagtaatagctggctgttttttacctaaatatgtccattttatagagttaaatctaatatagatgtgtaatttatctttatacattgatcaaccagataaacttgtaaattaaattttatttgctatgtgcattattcgttccacaaaattctaacgaaaaaggttaaaaacaacccacatgattatgtaaacatcaaactttattttatgaaactacagaagtttaactgaagtttcactgttgccatcaatctgtgagtcccagcaggaaaaggaattgatgggctgataagggtccacttcacctgcttttgaaggaaccacacctcttctctttcatgaattattaaaatcgagatacaaaagttgccattctggaaatggatggatgctgttagctgtcatgtgacaagtgaggttttatttatttttagctcacagttccctctcacatacatactgagagactgaaaaaaatgctggggatcattaaacatgactggttttatggtatctaactacatcttcaacgtttactaagactaaaatttaatctttaatctcaattatattacacatcatgaataatgtggacctgaattccagctcctgatttcttatgaagtcagtctacaaaataatcaaattaatttatacaagttacccaggaaaaacggtttgctgactatggttacatctcacttgcttaacttattcaatgttaagcttaatttccacaagaggttggagctactaagagttgtttgttaagaagctgcgaaaagagcatacttaggtgtttccacaccaaaccagactgtgagccccagaaatggacatgagaggccttacaagaccttcttctcctttacagccatttcctaaagcaaatattcaaagtctgcattacccatgagttgaaccatcctatgcatacaaaatggccactcagaaggattacgtaaaagctgccattcctttctaatagaaatgagtttgtgcactgaaagtcagcagttcatccacattatatcccagaggactaatttctgcagctagagaactggaaaacctcagcatttttcagggagaacagaaacgttatcctatagctctccctgcaccatcctaccctcctccttgcccacagccactgacgagtcagtgataaaagactccatcttcacctcaacttggatttcatttttactctccactcccttagacttgaggttctagaacattccttgcttttcagactaccttcaacttgatccgagattcaaacaccagtttccctggtgtttttctttcttattctcagaaacatattctctgctagaccacataaccattaactccacacatcctaaattctcttacaaaaaagaaaaaaaagagagacagggtctctgttgcccaggctggacttgaacccaaggcccaagcgatcattccacctaagcttcccaagtagctggaactataggtgactccacacattctgaagaggaagctagcatcctccctacacagcccatttttggtcctattatagttctaccttttttataaatgataaactgataacggcttcaagaaacaagtaaactttgaaagattgcaaaggaacccttcccttaaccctcctccatctcccctccataattcaccttattttccagagcctgctctcctcaactacctcattccaatttactatatgttggcttctgaagaaagccaacgtttggaagccaatgtgtggtaaattgctcattgctaactgaggtgtatttaagtttgcatagtgactattatgagcagtatttcatacattcttagcagtcagagaagccttcctgcgaacgaccaccactcttctacctctttttcccctcctctcccacccatgcacacatccctttctgtttatggaattcataaaaacatgtagcaagctgaatctaaaaagtccctggtcccttctaaagaagtctgttataaagagtggaagaaacagccaaagaagctattgccaatgaaaagagagacctcgaaccttaatattgtttcccatgtctttgctcaacactttggaagagattttatgggttttgtttttccagtacagttgactcttgcacaatatgggtatgaactatgcaggttcatttatacagactctttttcagtaaaagttacactgaacatgcctcctctcctgacctcccttccacctcctccatctctgctgcctctgcccctcttgagacagcaaggccaacccctccacttcctcctccttatcagcctactcgacatgaacatgatgaagatgaagacctttatgatgatccacttccactcaatgaatagtaaatgtatttcatccacctttttcttaataacattttctcttctctagcttactttattgtgagaatgcagtacataatatatatatataacatacaaaatatgtgctaattgactgtctgtgttatcagcaaggcttccagccaacagtaggctattggttaagtttttgaggagcaggctattggtgaagttatacatggattttcaactgcattggtggaggaggggggtcagcatccctaatcaccacattgttcaaggatcaactataatttctttgctgtgcccaaaatttgagaggtacttataactgctggtagaatttttcctgtgtaaaaataggtggcatttgtctgagaaaaccaaacctgggaaagcacagattcaatctgaattccaaaagggtgtgctttcccatctgtacactaaaagatttccctgtaattccatttgctggtgactgcacatttttcaaattaaacttgaggaaggaagagaacacttgtccttgagaagtttatagcaacagaagcaccagaatagaaactttagataacttagaaaaattaaacacctctaaacagcaccccaaaaaagttagccatttttaagatatgaacattttattttttcttaattagagcattgaatatcataagtagatcaagtgtgtttgctcctgttattaagagcaagaaaggaagattggccaggcatggtggctcatgcctgtaatcccaacactttgggaggccgagacgggtggatcacttgaggtcaagagttcaaggccagcctgaccaacatggtgaaaccccgtctctactaaaaacacaaaaattagctgggcgtggtggcaggcacctgtaatcgcagctactcgggaggctgaggcaggagaatcactggaaccggggaggtggaagttgcagtgagccaagatcgcgccattgcactccaacctgggccacagagtgagactttgtctccaaaaaaaaaaaaaaaacagattatccttttagtgcttgaaagtgctctgccctttaaaaaatataccttacagagactagagacatataactaaatacaatcttagactgagtccttattgaaggaaaaaaagtgttataagtacattgttgggtcaattaacaaaactggaatatggacagtaaataagagtattatattgaggcaaaatttaccaaagttgataagcgtactacagctgtgcaaaagaataaatattcctagtcttaggaaatacactctgagggatttaggggtaaagggccatggtgtacgcaacttgcttgcaaaggagacaaatatattttttctatgttatgcatacatgtatatgtgtatgtatggaaagagagagcaaatgataaagccaatggaataaaatgtccacaacaggtgattctggataaagggtatttgttgtgcttctcaatatttttactattgcaatttttctgtaatttgaaatgagttccacactagaagtttaacaaatatacaccttacagtttgaaattatgttttaaagaaaagttggaaagcggagagacaaaagggggaaaaaaacaggtaaaaaattaatttcgggaaaataattatccacacatctaggtggcttcttcccatcttctgagacaggtcagcatcatagatgcctactgtactccagtcctcagcctcattcttatctctccagtcttcctgatcaggaaatagcttcaaaggtcagccaggttggctcaaaaaatccacagacaaaatgggtgaaaatgagtatcttggaaatggtgtgttgcatcctcttggtcctgagcactctgcctcctcgtgctgctcctggagccaccactgaatcaggcaaacacatttcttttctttcatttttttttgttttggtttggtttggtttttggtttttgatttttgttttttttttttgttttttttttgagacagagacttgctctgttgcccaggctggagtgccatggtgtgatcctggctcactgcaacctctgcctcccgagttcaagtgattctcctacctcagcctcccaagtcaccgggctaaaggtgcccaccaccacgcctggctaattgttgtgtttttagtagaaacgaggtttaccaaggctggtctcaaactcctgacctcaggtgatccgcccgcttcagactcccaaagtgctggaattacaggtgaggcaaacacatttctatgccagacctctagggggaactccttgggattgacgctcaaaggcatgaagctttgaatttctctctcaatgttacaaaacttaaaacccccttcgaaatagatggctacgctgcagaccaaggtactaaacaatattttattataacaataatcattagtgatgtcaattgagaaaaatgacaacacaagtctcaatcattttaggaagtttatttgccaaaggtaagaatgcgagcctgggagacaggtctatgcctttctccaaagatgattctgagggctccaaatttaaaggggaaagggcaggatattgcaaagtacacaattttcacgtaagagggggctaggaaaaattagtcattcgtgcctttgtctggctcaataaatctgcattttttttatgtaagatgacatagacaaataaggcagaggaaaaaggcaggcaatctgcattttacataagataacatagacaaaatggggcagggaaataatcagataggcatttgggtcagttgggcaggaggatggctgcacctgtaaagataagctatcaatttgcattgccatggtgaaattttaacagaaacaccttagagtaaagatcttgcagctcaccaggaatttacttgtaggcaaaatatgggggagacatgtagcttttcatcttgtagccatcttatttaggaatgaaaaacggggaggcaggtttgggtgaccccgtccctagctccacttttccctttggcttaatgagtttggggtcccaagatttaatttcctttcacaatatcattctattctaagccactgaaatgtgttaactcatttaatcctcacaacaaccttgtaagagaagtatatgattacttccagtttataatacaaatgaagaaatcaaagcccagacagaataagtaacttgcccaaggtcatgcaactggtaagccactgaatttgaacccaggaaatttgacttcaaagaccacattcttaattaccacactcaacttctcaactgcaccatcctaagacccagacatcaaccttcatctgttagccagttagaacaattcaaattatcctggttgagtggcctggatgtcactacagatgcgatattgcctttgtttacaatcccattgtctaagcttcataaggcaaacccctattgaaaagtcaagtttactccatggttgctattaaatttctggggccatgttcagcatttgttcttttcacccccgtcaaatgaactggatagactaagcaactaattgattttctccataaaatcttcaacaattttctcataacccaaaatgatctctcccctctaaatccattatgaatcatcaggtggtgttcggcttccataacaatagacaatgtgccatttccttgcacataatccctgggtggcaggacctaagatttgttcggttggcttagctcatacttcacatagattctgatcaagaaatctattttcccctctctgggaagcaggagatccacggctggctttcatggaaaacaagcaaccacttatctcatgggctttccagtctcaaaagaaagccccacagctataatagggagggtgctgtagtagaggttatagaagtagtagtagtaatagtctcatagcaccagtaataggcgtagtggctaacatttcaccaagtatcaggtccgactttaaatactttacctcatcacatccctatgatgtaagtactgtcgtatcccattttataaatgagaaggctgaggcacaaaataaggcaggtatgtgggcccttggaaagtcagattttgcagccaccttgtattggtcagacagtcttaccactgtagcaaacaaccccacttctcagtagtgtcacctaatgaagattcatcccccagtcatagcacagtctgatgagatactcagcagcatccttccacaaggtgattcagaagccctgggccctccctcctagaggctccatcatcctctggtctttggagttctccgtggaccatgtccagttgacagagaataaggaggcctgaaatatggtctcctgtgtgatcaagagaaaaatgaacacattgatgaacacacggtatgctctcagagcaatcttagaagcgtgggtcacttagggacagaggatagacagcaagagaagaatgctggccccgaccacctctccagtgtgaatgccaccttccctccctcaccgttccccaagcagagaaccaacattcacacaaatcggattatgacttctcgtgttttcaagaacggtcagtcctctgagtcttccaggccagagtctccctccacaactaaacgcagaagtggggtggaataaaggacagaggtacgtgaactttctctgactcacctgggcttcggccggaaataagcaaagtgctgatacctgacgtagccgtgacctgggcaaggtattgtttcacatgatcctgttcctgagtgcttaggcaaggctcgaccagcctgagtctcactctggctcctaccacaccttgtttattaagtcataaaactttcatgaagttaagccaggcatagcggggctcatctgactacagctacaagcctccagaagagtgctggcactaagacagacatttgtcgaagggtgactacctctctgcttgccattcaattatgtcctgtttgttatgaattttatttgattcctccatcagaatttcctttccaattatggaaagtgaagaggtatcttatcaaacatcagatccaggacattcagacttccatgtgtccagaagacaaaccctcgtgttgcctttaaaatacctctccgccaggcacggtggctcacacctgtaatcccagcactttgggaggccgaggtgggcggatcacctgaggtcaggagtacgagaccagcctggccaacttggtgaaaccctgtctctactaaaaatacaaaaattagccaggcgtggtggtgggtgcctgtaatcccagctactcaggaggctgaggcaggagaatcgcttgaaccctggaggtggagggtgcagtgagccgagatcgcaccattgcactccagcctgggcaagaagagtgagactccatctaaaataaataaataaataaaatacctctcaaagatcttaactttgcctatttttattgtttcaggagacacgtatatagtgacgccactatccaaagacatcttcaatgatgcagcatcattaattcaatgttttctttttttaaaaaaacttttgagtcaacgtaactttttccctgactgttttgttccttgatgttcttgcctttacctggtgtcaaaacccatctgtgagcacagttagataaggcttctcattgttctcagggtgcataaaatccctctccctcccttccttctctccctctccctgtgcctttctctggctctctctttttctgcctacctcatctctacccttcctccttccagaagctttcaaatacaaattgagaaagaagaaaactccccaaataaaactatacaagcaaatccattcggcataatatctgtgtcattctgtatgaaaatcattaggtaagtgtgacctgagagaattagagaaaataaataggagcaactagaaaccaatgcacctggtataactaataaagaaaacatgagacttttagtgaaaggagttaaataagaccactgaaagttgatgtgataggaaccacatcaggactaagcaccttttaaataaactaatcctgcactttaggaaatcaaaactacagctggcagtatccagttcacatcactgtgctgactgcctaccaaaatgaggttttgtgttcccatgtatatcccactcacaatagcaaagatatggaaccaccctaagtgtctatcaacagatgaatggataaagaaatggtggtatatgtacaaagtggaacactatttggccacgaaaaagaataaaatcctgtcatttgcagtaacatggatggaactggaagtcattatgttaagtgaaataacccaggctcagaaagatgaatattgcatgttctcactcataggtgggagctaagaaaaggggagcacatggaggttgagagtggaatgatagataccagagactgggaagggtgtgtgggtgggaggcgggggcatgaagaggggtaggttaatgggtacaaacatacagttagatagaaggaataagtgctagtgttccatagcagagtagggtggctacagttaacaacagtgtattgtatatttcaaaataactagaagggagaacgaaaatgttcccaacacacagaaatgagaaatacttgggtgatgaatatacaaaaaccctgacttgatcatttcacatttatgcatgtcataaaatttcacatgcaccccataaatatgtacaaatataatatattgataaaataaagtgagtgctatgttacacactggggttggagggctaaatcagaagtgatctctgcccttgaggagggagtcagactaagggttcccctacaagatggtcaacgtgatgacagacacgcaggaagaacagaggactgtacttcaatgtcctggggacagggatgggatctggcatatgtaagaggaaacagccaacctcaggtgtaagcagagtagaatacaagagagaaataattagcagaaggtttgccaagatgtcacgggggaagtatgtggatagaacaaaggccgggggaacgggggaatgtgtggaagaagagtctggcctgatgtaactcagaggccacgcaagaggcacggagcaggcgaactttcacctgctgactgttctagaaagcagcacatctgaggcgttcttcactctctttggtgataacttcttctatccgaatgtagaggagaccatgagaaatgctacctaggatgaagttctgattaaccaagataaaccatctctgggagagtagaagtggcagaaatacagaagaaagcttctaccatcaccttggagtttcacagccaggcaggagagtgaatttgaaaaaggctaaagaaagctcagaaaaaaaattacggccaggtgtgatggctcacgcctgtaaccccagaactttaggaggccgacacgggcagatcacttcagatcaggaattggataccagcctggccaaccatggtgaaaccccccctctactaaaaatacaaaaattagctgggtgtggtggcatgcacttgtaatccctagctactcgggaggctaaggcatgagagttgcttgaaactgggaggcggaggttgcaggaagctgagataacaccactgcactccagcccgggtgacagagtgagactccatctcaaaaataaataaataaataaaaaataaaaaataaggccaggcacggtggctgacacctgtaatcccagcactttgggaggccaaggcaggtggatcacaaggtcaggagatcgagaccatcctggctaacacggtgaaaccccgtctctactaaaaattttgaaaaattagccaggcgtgatggtgggcgcctgtaatcccagctactcgggcggctaacgcagaagaatggcatgaacccacgggcggagcttgcagtgagcgcagatcatgccactgtactccagcctgggtgacagagcaagactccgtctcaaagaaaaaaaaaatattacatagacttccatggacaaagtcatgagaaacgaagacaattcaagagaaattcaaggctccagaaaagtgaaattggttgtagtgatacagtcagaaataatgcctatatgactacttaaaaacatcttgcattaaaaacattttagaaattattaatagaaagttataaaaatgaaattaaaatcactcacaatttcattaaccggaagttttttctccaataaatacacttaaattggaaaatagtataaacagtacatcctacttttctttcacttagtataagagtatctgccattaatttagctttctttgaaaaatgtgacttttccaaaaaaataacagatcttggcgaggttgtggaaaaaacggaaccttatacactgctgttggtaatttaaattagttcaaccattgtagaaagcagtatggtgattcctcaaagagctaaaagtggaactaccattcaacccagcaatcccattactgggaatacacccagaggaatataaagcattctaccataaagacacatgcatgccaatgttcactgcagcactgttcacaatagcaaacatggaatcaacctaaatgcctgtcaataacagactggataaagaaaatgtggtacatatccaccatggaatattatgcagacataaaaaagaatgagatcatgtctttcgcaggaacatggatggagctggaggctattatccttagcaaaccaacacagaacagaaaagcaaatactgcatgttctcacttgtaagtgggagctaaatgacaagaacttgtgaatacagagaaggaaataacagacactggggtctacttgagggggagggtgtgatgaggaacaggagcagaaaagataactattgggtactgggcttaatacctgggtgacacaataataggtacaaccaacccccatgacacgtttacctatgtaacaaaccttcacatgtgcccccaaacctaaaataaaaattaaaaaaggaaatgtgtcttttcatagctgtgaatggtgtccattatatggatgttagacaatgattttagcacttccttattgctggaaagaggtcattaataatttattgacatgataaataacaccatgatgaacatcttcaaggcttttgctattccttcacaacagggtgggctcttcctcagctcctatgtgaatatggattgctgatgttcttacttggactgctgtgaaaatattcctggctagctaacgcacttgtctaaggaaaatactacagagcttacttttcagttatccttgataatagagggaaaaggagatgaaaacaggcgctatttcatctactttctgcttggcctaaaaatgcatgggaacagctccagagaattcccagacaccgtgggtggctctgaggggctatttttataataactaattttgttcattttcttttatgccaatcagaagtttggccagtgaatcttcccccaccctcctcattctagtctctataaaacagattactttttctttatacataccacacacataggaagggagaaatacacaagagatggaaatgcaactaactttgtccgggctctgcaagttgttcatgaaattacaaagccaagggaaaaaataaaaacactgttggaagagaagccagaactctgagctgaagcattggcttgtgtgttacagcagaagcctgcatgtggtcgacggttagagaagacagtagccatggggtcaagaggacagatgggcatgggcaatccaggaagccgagcctgtggtcagtggcctgtggggaagctgagactgtttttgtccacagttgagtaagtttgctgttagaagaaactcctttgaggcagcttgaggccttcatgaaaaatgcagcctaacctctaaggaataatgtctatgatgggtctcacgaaatctgcaaagaattgttgagcaactttaaaggctggtgtcctgcactgcctgccaagggtaaagccggtggacctgtgtatctcacaaatctcagaaacagctgattctttagagccctgttcaaatgaaaatactcccagaggtcttgcgactaggctgcattgctcaccactcagacgggagccttccatgagcaaaggagagacacaactttacaatggctccagctgcaaggaactgcattttttcaagagccagatgtgtttctccagataacacactgtcctccctactggaagctccagagaactccaggaggagaaggaagaagaggctttaaaaatgtctagccatgcagtgagtcaccaagcagctcttcgccttgttgttctctctttcctaatgtcactaaggtcacctctgaacagaagaacacccattgggggcccatggaggagagagcgtcctggggagcgcaagtaggctcctggctgcagccggggaagaggaaggcggtgaaacgaacaggctcaagtagcagcctgctcttggcaggagctactgctaattttccttggctggctctgactacctgtctgaaagcaatgcaatgcaggaaggaaatttttcaagagattaaactattattgtttcctgtgtggctgtcttcactggtgtatgaaaaaaaaaaaggctttaagagcacttgaaaagagatttgtctgaatagcagggtggttgtgattcatccccccctccagtcgggatttggccaatttcctcaggaaagtggtcgattaggacccatggatttatccgtggcctaaatataagatgtcataaaggtgattaatggtaagctcaccatcagagggagttaagagtttataaaagctatttttaacaggttggaaggtgaaaaaaactcatttgtcctgttgccaacatgtttcaatggttaaaaacctctttgtaggccctgataattcatgctaccaactgttaaaggtcgttgtattttctgattttacaagtttgtttgaaaaattgattcactgtgtttggctgtttatataaaagcaatgagggggaaggaaaagaccacgttatttccaccatgattagcgattgctgcgcgtggtgacacttcagtacaagagccttgtttcttctttccaccccgcctcaggggagaaaaggggcctttctgtttatgctcctaccacataaatagcaactgatggagggtgtcccaagacagttttcagagcccaaacaaaattagcctgaggttcccaaatcagggaaaattgcagtagttcagaaaatggaagatggcattgatggctcctagcagtgtccagtgtggttcctttgggtcacgtcacccagagatgctccaaaatgttacttcattctgacggtaattccataaacaaagcatccctttaaaatatgacatcttcttcccagtcacaaactaatcacctttgtttaaaggaacatatctgacccacttcttctcagaaaagctgaatttcctataaagtacctaccaaattatctaaaatgtgcatttaacattggcagaagaatatggtcatacactaatgaatagttgccgaatacaaaaggttgtcactgatgtctagatatttggatgtttcatggatggtagaaacatgaagtccattcttcaatgcgtatggcatggagtgggatgtggggaagggctaattattgaaatataatcaattgctatcaacaattttgagttactggcaaaaatagataaaatactttttttttttttttttttaaagaaacagggttatgctccacctcccaggctggagtggagtggcacaatcatcacacactgcagcctcaaactcctgggctcaagtgatcctttcaccttggcctcccaaagtgctgagattacaggcatgagccaccatgctagcgaagataagatactttcttatgattcttgcaatattttgaaagatgacaccaatcaacatgatacagtacagggtattccttgattaattcataaacattataggacagtctaatgtgccaagtatactcacaactagagaggcaaatatgaataagacttcaatgagctccacaggaagcctggtagatagagaagtctcttacaacagagggagataagagatatgatcatatgtatatatgcactccttccctgggagtcagagaggggtaaaattttttctcctagattgccaaaagtagagacaataagagcaataatagctaactagaagcttctgttttagggtgcaacataaaagctccaggaatggctttttctgatatctcattgtcctgaatttactctgaccaccacacctagctgcaaaggaggcgggaaaatgcagtttctctctgagcagccattgccacctgaaggatagagtttctattaccaaaaggaagaaaggaaagacaactctggggaacaggtagcaggttgtgcacgtcattttaaactattgccatgtaggagtcgaaaaggaaccataacatcagaaaatagccatcagcacgaccgtttctgttgagtgtgcaaggcataaggccatgtactctacagcctgcaacaaaaggtaaggcattttctcattttttgcattaaaattgtttataatcatttactattttataacaaatatttataataatgtttcatttattttctcatcaaaagagagagcaatacaagctgtatgagttttgttcaaaaagtagtagagaatttaagagcaaggagaaggaaaggagatgaaataagctttgagtcagcagactcatggaaagatagcaaaagcaagaaagatcatccaaatcagagttagctgttgtgatgggctgtttcctcagtcatctgtgagccctgtcagtggaggttgtgttttatttatctttgtgtgctgagcgcccagtagggctcatttcctggcatttgattatgctaaagtgagggaaagaacactttattggcctttaaataatgaatagaatgcactaagggctatcacagaagagccatttgaccttgacctcacaatcacagggtctcaaattttaactttcaagacacttatatgacatatatagatgacacgcatagttgaaagatgatgatattcatcatataactttgatttcctgtgttattaccaggccacaccacatgttatacacaataaattggtttttataaaccctataaatatcttgtgcccaacaccattatcctgagttgaacagtttgtctttaggttaaaaagaatttgtttgggtcaggtgcagtggctcacacctgttatctcaacacattgggtggatcacttgagatcaggagtccaagaccagcctggccaacatggtgaaaccccatatctactaaaactaccaaaaattacccaggcatggtggtgggcacctgtaattcctgttactcagaaggctgaagcaggagaattgtttgaacccaggaggcagaggttgcagtgagctgagatcgtgccactgcactccagcctgggtgacagacagagactccatatcaaaaatagtaataatgtgtttgttaaaagtaaactcagatagtccagaatgcttgaaaggttattttggcttttttttttcttcatcttttttaaaattgggcttttgtttatttctttatacctaggatctcagaaaaacttgaagtatcccaggcttttctcaagctctttaactattctaaggtcattcacttcctctatactccttttttttttttttcttcagacagagtttcattcttgctgcccaggctggagtgcaatggcgctatctcggctcactgcaatctccgcctcctgggttcaagcgattctccttcctcagcctcccgagtagctgggattacaggcatgtgccatcatgccctgctaattttttttgtattttagtagagatggggtttcaccatgttggccaggctggtctcaaactcctgacctcaggtgatccacctgcctcagcctcccaaagtgctgggattacaggcgtgagccactgcaccaggccacatcatctatactcttaaatgcaagtgccctgaaagccctctcttcatttgtcccatttagatttgtgaactgggcttccctccctttcccaggtgaagtcactaggttcaggcaattccctggccctttccatccttcataattgctactcttaggctcagtactctcactgggcctcaagatagtcaggctgggaccctagcttctggctcaaaagcaggtaaaccaggaaataaagaaagtttagatggacacagtccccagtttcctccctcccccaggagtgcctatgtggacattacagtgtttgggagcacctacaacactccccattcaaacttgataaatacacacttaactagatccaaatcccaaatcttatacaaagaacttaaatgcaagcaatctctaaatgaatttactaaaaacatgtgattttttgtttcatcctaacccccagggttcattcctaattagaaaggtctataaaaacaatacaatgacagatgggcacggtggctcacacttgtaatcccagcactttgggaggccgaggcgggtggatcacgaagtcaagagatcgagaccatcctggccaacatggtgaaaccctgtctctactaaaaataaaaaaattagttgggcatggtggcgtgtgcctgtagtcccagctactcacgaggctgaggcaggagaatcacttgaacccaggaggcggaggttgcagagagctgagatcacgccactgcactccagcctgggcgacagagtgagactctgtctcaaaaaaagaaaaaaaaaaagaaaaaacacaatggcaaaaacaataatccttcttcaagcctaagtttcacacatatcagcaatattggcataagaagcagattttgtaaaactgcaattcagttttacaaaatctaggctctctcacctttcccaactatgcttttcctctccatgacaatgtctacgtctgtgacttccgtgaacaactgctgagatgcagggttgacttccagatcttcaattccagcctcaacctctctcctgggcctgcaagtcatatgccactgcctgtgaggagctgacacttgggtatctcaaacttgggcacttcaacctcagcgcattcaaacctatgctcgtcaactcactccagacctgctcttccttcaagttctcctggtcagttagagacattaccacctttcttggtgctccagctaaacatcagggcatcaccaaccccatatctgatccccctccaaatctcattgattctgtctcctgtgttctcaaatccacacactgatattacctcatccagccaactctgattcctcttctgcacaataactttctaactggcccctctgcatccattcttgtccctgaattacccattcttccctctgcagccaaaagtacttaaatatcctttcccttattcattcgacaaatatttatgaagtatctatcacaagttagggcaccatgccaagtacagtatatagtggtgagcaaaagagctgtagctcccatcttcatggagtagacatgaatctgattgtcatctctgtgcttagtatctgcggcttgcagaagacagcccccaaagatgtccacgtcctcatggaacgggggcacaagctaaaacatgcaagcagccagcaaaagctggaaaagacaagaaaaagtatcctcctgtagagcttcctgaaagaacacagcactgccaacaccttgatcctagcccagtgagacccagtttggacttagactctctagaactatgctgttttaagccacaaagtatatgataattaggacaaccatagaaaactaatatgttggtttactaatattcatagtatcaaaacagcacagtatccttcaatagcttcccagtgcctttgggataaagcagaatccttagcaaggatggcaaggctcttgtgaactgccctgccagccacagcctcacctggccactctcatttcctctgtccactgccagaaagctaaactgcttccagctctcaaaggagctcttctttctgagcctggaacaaactcttcccacttcctggaacaccccctcccttcctccctgctttatctgctgcacacctactcccaacttcaaccttcaagttaaagaccctcagcctgttcatgttagaggtgcccatgctccctttacttacctgttcacacctgtctctgtatgttttaatgtctctaatccccacttaattaaaaactagagggcagagtctaggattctcttattcaccatcgtgaatgcctacgatggtgggcactcaacacaaattttcaaaatgtatgaatgcaccaataagggacaaaaggtaagtttctctttcatctaaagcatagttcccattgtgtacatctggccacttgtcatactcaaacagctgctttatcatccaaaatcgttttgacatcttaaattttgattgctttacctaaacacacacacacacacacacacacacacacacacacacacacacacacacaaaaccctccactgttatgcatcttattttttacacattgcacttttaagtttttatctggtgacattttctcaccttctagcatcacctgcaaggtgcagctacacttcctgggtccctgtattcattcattccaagcagatcaccaatcatcaaacacaatatgaccagtcatgggcaatatctaaaatagccattagccagtggcccctcagaatcactttacccctctaggaagatggcgcttccaacctcccatggccaagcgttcacatggaacgtctgctgtggtggaaaaaagtgcatacaaggaagtggactcctcccattgtgtccactcagcacctcctccagtagggacctcatctcctttctgaggactcttctcccttcccccactacacctgtgaatacaaggtgaggcacctttgtggccacatttcaggccaactacaacagctccctggaaaatttaaaactgagaaagagatgctgctctctcccatttccaacagtttgcaccaaagaagctaaaagaagaagctaaagtccaggaggaagcgagagagggaggaataaaccaaggcagagaaggagaggattatttctgaggttcattcctcagattgggagtgacccaatctcacccttgggttccatgaggcagcccaacatccatttagcacattctcctttttgccttagctttttaagttgtgttttcatcacttacaactaacatgttgtaaacctttgtaaaccctcataaaccacagcaaaaagtgagtccatctatggctgtacagaagctcgcttcatatgcaaagtgaaccatgtgccaggtagcagcatactctctctcagagaatgcaagatcatcattcatccatcttactgtaggaagtgcagaccttactacaagagactctggccccacttggtgttcccagttcttgacaccacagcgagaaagaatccagggatgagtcagaatgaatgaaaggcaagaagcttttattgcaaagcgaaagtacacactcaacagtgggcgcgcaagcgttctcaggagactgagtcacgcacaacacaggtggggtttcacatttctaattttacgagctcttctaattagaggtggaatattcacgacattttctaggaaaagggtggggactttttagaattgaggtcccaccctttttttgtttgtttgtttgtttggagtgcagtggtgccatctcggctcacagcaacctctgcctccaggattcaagtgattcttctacctcagcctccggagtagctgggattagaggtgcatgccaccacgcctggctaatttttaatttttgtattttcagtagagacagggtttcatcaggttggccaggctggtctcgaactcctgacctcaggtgatccgccctcctcagcctcccacagtgctgggattacaggagtgagccaccgtgccctgtcaccacccatttttatactaaatatgggcatgctcagcccttggtcatgttcactagtgggtgtgtgatttagtgtggtaatgagcatataattaggtatgaggtagggcatacgggcaaatccaatgccatgttggatctagccaggttcaaccagcttagccctcaccctgcttgtgagggtcttatcagcccaagctcatccttgtccttgtagctaattctaacagctcctttcttgctgctgtgtgaaattgctgcttgatattttcccacttctctggtgaccacccagcattcttattttatgggtgtttctttaattaggaaatggaataatcattagatattctggaaaaagagggaatttcagggacccctgtttaccaatccctttctcccttatttggatttgcctggaagagacacggacctgtcaccctgaccagggttttggccattttctctcccttattttgggttttctgttatcctgcagcttctttggctattagaaatgtgtttcaacagtctaaactagaactaagtataacgtgataatgccccaaaagtagagtgttggggacggagaagaccgatgcaaataatgatgataactttaatgataaattagtggtgcatatgtgtaacagacacatctaaactgagttaatgtggagacaaggtagagagatgttgcctccagtcttgaagcccatccagccagtttctgttgcaaaaaaagtcctcagtcaagttaaatgaaggaatgaaaatgagatgagaagagagatggcagcaccaattctcctccttcttctcttccagtcttaacattctgcaccccattccttgttatttattttcaaggaaaacttgaattttgaatagccaagttttctttgcttaccatgcacattaaggtatgactctgggcagcccaggacaatagctccgaatcctgtgctttccagtgccttagagaaacacacactggacctccatggatacaatgggaaaacagcaggattgagagcaggtccagactgccatagtctcaaggctctgcttctaagatctgcagaatcacacagggaaacgctatgggactctaaggcttcatgatactcctgactgggaagccaaactctcctcctgatcagactcaggtcacctcctgtagccactctcagcattccagtacaattcccactacagaagcacacctcactagagcaacagagaacttagcccttcccagaacacaagaatctgaggacaagttcactcctcagatgtgttgatctaaggcaaaacattgtctgtgcgccccccaatgcacactcctcaccaccatctcattttttattttggtgtgtctcaaagaaaaatttaacctcaatggcacctgtgaagaagaagaaaagtcacaagtggaaggagtggaagtaggaaaaaaatggaatagaaatggtagctcaaagacgcatgaatgagccctaaattaattttcacattagctggagcaccacgcatttatagagttacaacccatccaccagcagcaacacggggctccactgcctccccagggtaatatcatctatttaccatgacaaaaagatctgtctcaaacaaggagctagtttggatgttagtcacttccaaatatcagtttgatagcattataatggactaagtgttgatttcagctcattggtaaaccgaacacttcatagagtcatttgaaacagaaaaattaagcaggtaaatgttgggataaaaaaaaaattaacaaatcttcaaataggaaatgcatttattaaattaattgcgtaggaaaatgacagaaaaggtaggaagagagaaaggacatttccctagacacaaaatgtcttagaggcctggagcaggacactcgagcctaaaataactctcgattccttaggttccatgtcttttagcagaagctaacttttctggctcagagtgtataactgaactccagtgtgaaatattgaaagaaaatgactacagaggacctatttagacattcctggcaagagccaggttagaggagaggagggaaagggctgtttatcttgacagaggatttccttaccagaacatggaaaacattctttttgtcaaatatggttaatagtcacccagtaacacaaagagcagtttcagtagcttaacatcaacatggggtgactgggaaagctgaccgtgccccagcagatggaacatgtgctaactcacagccatgtcttggatggggacagtgttgttgatgagtgcataggaaaaatatcattagctagtacactttccaccaaggaaaatgttgtcacctacttactaggtaatgtagacatgcccaaccaaaaatgaggcaagcagcaatattaacacatcctcaaaatgccttgaaagacccggctgccttttcaaataggaagaacagaggatgccctcacacatacaacttccccattctgatgggaatgactgactttttgtagcattgcaaccaactccctcgctaagctctgtgggtatttcccctggaggttgaggcctctgaacagaacatctgtgatgagaacagtatggagtaatggaaacatcttggattttagacttggttatgtagcttctagccctgagtctgccactgactgggttttctgaaacaattcagagtctctctgggccacagtttcctgaaaaccttctcaattccaatatgtaaaaagacagtcacagagatagaaaccctcttaaaggttatgtatattagagataaagccctgagctaaccttctagtttcaagtcaaatatcaatattaaggtttggttttgttttcaaagacatccaacatttttgtttcattcttcaggtttcagaattagctcaaggaacttttatatgtggttcatcgtatttgctctttcctccatccacacctcttaaggcacagttttctgtatcttctctctacatgaccccaaattaaataaataaataaatatgaattttgttctcaaattctttgacattctaattatctaaaatgctcttcttttatacctgaggttttttttaaaaaaaagggtcattactacttcttacttgagaattatgcaaatttggggagagattttatatttttttctgcaaataagaataagaatattgtgatgtgtgtggtgtgcttatttccctgagaatctgagcaattatgagttcattttgagttttttcattcaaataacaaaagctggaagcagtaaactctaaaaccagaaaagtacttgggaatatcatgagcttgtgtttggtttagtagactgcaatatggtcaatatactttgtatctgttcccatcaagagactgagtctatttccctgtctctttaatctagccgtgtgtcttgctctcgcaaataaaaggcagcagaagtgctatttggccacttctcatgggaacttctcagctttgtcctctagaggtcttgtagatactgtctgatgctttaacaatcctgccaccacctgaacaagcccctaatagcttactgaaagatgagagacctttggcagtcactccctcacctcagcctctaaccaaccaactaccaatcgagtgaatgaagctactgggactggccagcacaagctgacccacaaaatgaccacacactcacaagcaagcccagccaacatcagctgagctcaaatcagaccaaaagaaccacctagcagaatcataagctaaccaaatggttgttgtttgaagccatttgattttgggattgtttcttatgcagcaaatactaactgatacacccagtttgtttttaacaaaggctaatctaagcatcattctgcattatgttttatttatttatttatttagagatagggtctcgctatctgggcaatagcccagcgtggtcttgaaatgctgatctcaagccagcctcctacctcaacctcctgaagtataagattacagacaagtcaccacgcccagcctgcattatgttttagataatataaagtaagtagtatgttctcagtaacccccttttatcttgccttttctttgccctcagcacacagcactctctccagatactgccatattctgccatcctcagtattcctgtcccaagagaaactatttaataaaatcgatttgagcaaatacatgaacagatagagtattttcagatgcattatctcattatatttcattttattttcacaacaacccatgaagtgataaacatcattcccattttacagataaggaaaccgcagctcagaaaggaaaaagcttgtccatggccactaaactagtaagcagtctctcacctccaaaccttatagttccctacccatcacacttccacctcaagtttctctccatctaagatactggcatttcaaaagaaaagaatttgcattcctggaggagaggctccttgccaccaaccctattgaaaattcatacattaatagtagattacagaaaacattttggagaggtcattcctgatgttcctcaaattacaatttatattcctcaaatgtaaaagagtgcaagctcctcctctgtcagagacccaaagaaaggaatccatttaagcagtatgtcctttagttacacactcagaatatgactgtgcaccactgtttgactgaaggataatttaaggacatttctttaaggatgtcattattgcctccatttaatgactgttagcctaagcctgtggttctcaaagtgtggatctaggaccaacagcatcagctccacctggaaacttttgaaactacaagttctaaggccccaccccaggcccactgaatcaaacctctggagatggggttgagctgtgtgttttttaacaagccctccacattactaggaagcatgcttagaagtgaggagtgagaactccatgacaattgctcaatccactgacttcatagagtaggggctggtaaactgcagcccatgggccaagtccagccagccacctgctttttgtaaataaagttttattggcacacagaagtcagtttgcttccataccacaccacaagagcaaagttaagaagttgagactgagaccatatggtccacaaaagcaaaaatagttacaatctggccctttacagaaagagtttatcaactgctgtcctgggggttgactacattcaggtgcaatggataagaacataggttttatattcagacaatataaggtttaataccaatcttcacaatttactaagtggcctaccatgagaagtttcttaattgctctaagtaggactgcatttcttcctcctctatacactggagacagtcaacttgtaaggttgttgaaaagatgagatgagattgtgtgtatgaagtgctgaacaaagaacatactgcagattcaatgagtggctttgcactcatctctgtaaataaacacagtatctatctccttaaggcatcatgtgaacaaccggaaagctgtgcatttggagtggatgctgggatgcacccacctcagatccccttcaataaaggactagtagccccagctgcagtcagtgtccacagaagccttcagttcccagggcctgcaggagtggcctcagaggcctcagtcatgcccttcctgattgattgggaaggagtataaaagcctggccatcttagctccagtcagaactctgaggttcatttgagctccagagtcccctgtggggctgactgaggctgcaactcaacttctttcctgcccactcctgcccccatccaacaggtgttgcttccagcccgaggactctccccagtgaacgtgctgcatgccaaggtctgccctcttagtgagcccaaccatgacatctcaagacttggagaaaatgtctagaactgtctgacataaaatgccatgatattcccatggcaataagcctcgaagataaaggtctaggaaagtggggagaggtttttgagaatttccactggagggtgctgtctttggtggacaaagttatatttccatggtggtagtagttgcaataagaaaaacctgagttctctggtgcaccgattacggagatgtttaaactcatctttatagctcagtgccctgggcagctacccagctggcccatcccataacccatctctgattccaaaagctccttcaagtcttggtagataggaaacagggcatcaaaatgacacctaagtccagcccaaggaaaacactaggttgttgcagaggagaagcagcaaccagggtagatgctgagtaaagaccttctgatgtgtaaccaggcttatccccagaaagggggttaagtgtgatggtgataaccccactagtgtggggttatcagcatcacactagtgcccacctgggtggactttcggtagacaatctccattttaaaaaagaagaaaaagaaggagaagaagaggaaaaaggaagaggagtaccagaaggagaaggaaaagaagaagaaatggagataaggaagaaaaaaagaaggaaaagaggaaggaactaggaagggaaggtggggaaaaggaagaaaggggaaagatagggaaggagggagagaagacgtgagggaatggggagagaggaaaaaaagtagagcttctattcataatggtcaaactatcaaaatgcccatcaacaacagaatgtaaacttcatcaagctgtacacttaggatatatccatggccacttttctgtattgtgttatatatcaactgaaactgctaaaaggaagagttctcactggctccgtatgccccaaaaacagcaagtaaaagctgaggcttatggaaattaatcctgaaattagacctccaggataattcatggggtaaaaaaaacagaaaaatgcttcaaaaacacctaattgaagcctggtgactttgtctacaaagaaacacactattttcatcactagaagtaagcttttattccagattctttcaatatgcacatttgcaaaactgtggcttatttctccaaaggccttactaaatgccccactgtttactaaagagccagtcttgaagagcaagggaaagtttacaagctgctaatgagggcttagcaccctgggaaggacaaatagctctactcagcagctccacagagggaaatgagcccctgtgcctgacaggtgccagccaggaagcgcagtcctgcattgattgctaggtagctagagcagaaggaggtctgggtgaattatcatttcattgactcggtgcaaaaggtatactgagcttaggtcactgggttctccacaagccaaggcagataacaagaaaacaacacaccatagtaatagcttgattataactgctctatgccacttttccttttgacttaagggaaattgtctttgcagggaaattaaggggaagggacacaaggaagactgagtcccatttatttgcttgtttcacacattcagccaacaaaatttttatcaagtaccaactttgcaccagacactcctataaatgctgcatttgcaacattgaacaagatcttcaaagtcctttcccacgtggagttgatattctggtgggtgaaaccaaaacacaaataatcaaataaatacctagtataacatcaggtgggaataagagatagatctggttgggagctgttgctttacaaaagggcatctcataaatctctctcgaaggagggggcatttgctatataggccagagtaatacatccctattttttcttacattattgaaaattattggaaggctataagcaatggaatgatatcatctgattatgcttgttaagactcactctggctgcctgtagatgcattttaggacaagagtagaagcctagagctatgggaaaaagagatggtagagatcagagaagtatatacagatttgcaatgttttggaggctgaagcaaaaggatcactaacagcttgagtagaggttttgagggagagaaggaaatcaaggagaacagccactttttggcttgagctgaagtggttagcggtaccatttactagaacattcctgcctcttgatccccatgataaaaagaacttttcatctatggaatgtctctgtcactattgtctagagaagatagaactggcttggacatattcctaagaagcaagaaatggcagcctcgttatttttcagcccttgtaggctgtaactttgggagcacacaattcataaataaattccaagtaccttatttatctctttttttccacttgattgaaatcctgggcattgacttctactaggatgatgaatttggctagaactttgtcacattcattcaagactaatatggtgttatctagtacaagaaacagatgagaaatcattcctgtaggactgaagctcagacacggcgcaaaggaaacacatgagacataaggaaatcattggaacacagacattagacagtcttgtgctgaattagacaatgtcttagttcacccaaaatgtagtatttataggcatggcaaggaattgggaattaacttgggcccacagtggttgtgtttcaaaggtgaattttcttagcactattcaagagcattgaactttgcataagcaactaatcaacctaggaaaagcatccagccaacaagtattttttgagacatttttgtcttccaagtaccaagaagagtacagtagggatccaaataaaccagctcagctccttgatgaaccaggggtctaaagggaaagttagcactggcaaggtgattctaaatcatgaaatacttgcaaggagaagtacagaatgctatgggagcacataccgggagaccaacccggtgcagggagtcgtgctgagataggacaggtgtcaacaaggcaaagagaaagcagacacctcaaacagagccaacagtcaggaagcggaaaagagtgtggcgaggaactctgaggagtggggcatagttatctagaggagagggcttagaagagaagggtggacaaagaggcaggagaggccggcaagggccggatcaggcgactaaggcctgataaaccacacctgttgtttattctaaaggcagtgagaagccactaagtggccataagtagaggaatcaagggctgggtttttaaagatcactctggcagcaggataggaagggatggcctaggacaagtgtgttcatggcaagagagggaggaggcttgatgaggcaggggcaggggtggggaactgcaagagttgcttaggcagtagcatgatggataggcgtgtgccatgcacagagtggggcagaggtgggagctgcggcaggcaaggaggcagcagggtcaccaggattcccgggtttcaagccagagcattttactaacatggaaaactccagaagtttgcatgagtctgtccattcagttccagtttccaccctaggtaataagaatgcagtctagaagaaaatgtagaatgaaagtcaaaggaaccaaaggaacagagagaggatccaagagcctaacagaaacagaaagtaagagagaagggaaaacacgtaaccaaaaacatatataatgaagcccccgccgccaacacccccgccacctgacaaaaggagaggaattaacagcatataggactcagcagggttgagagaagcaagtgtagcaactgcctggcctgtgatttctggatggctagaaggtacacagttattctagcttggggcccacagagataaggcaaaggccagtagagaaaaaaagataccagctgtgtggagatggaaaggaatcttccaccccacggagtgaagtcttaaaccatgcatgagaaggctggatatagaagctggaacaccacatttgtaccctcttttgcccattcttggatagaaatgaaaatatcagtgattggccctgaaatgcaaaggttttgtaaaaaggatggtgtccagggactctcagtgcacagttaaaggcttcttgtttaatggctgacatgtaagatgtctaatattttccgctcacttaacctcttattctgagaatggaccgattgtccaagattgcagacatgctcaggagtgctggcaaagggctaaaatgtcttctgtaagactccatggaactatttcccaggagaattcatgaaaaatgttacagatgatgtgttacacctcgaatgaatctctttgtcccacaagtgtgtttctccactgctttggagaatctcccagatagagagaaaatgggaattaatttattccaagagaccctattgtttaatgacacatacagtaagagatccagaatcacaatcacccaaaccacgcaagcaatggcaagtgctctaaagaaagatggggacatccaaatggtaggtaaagcttttcagcaaagacactggagaagggaatccaatgaactaaaactctgcaatgttaactgagggtttccccttgcatttccgagaacgatggaaattctccctgccttccccaactcagagtcagtaatatgcagtcattgagtcagggaaggtacattacagtaggaaaatgagaaaaaaaaagacttgaatgaaactttgaatatggctttccttgttcagaatcacagtcttcatctttccagagactaagattttaagcttgaatcgcccacgttctaaatccttcaggaaataaagcccagtttgtttatttctcagggtcccaggcagagaaatcaagtgaatcctgcttctcagttcttagctgtttattgctagcatcagcctgtgcaaaactcctctctggttttattttttcccctttgatctgtaatccccactccattccctagagccctgcaggtaacccactctggagggtctgtttatccctaaatatgcatatgtccttgtaaaatatccagagccattatgtgtatgtttaactaattaatcataaattattaataataatctatccacattgccatgtttacatctatattgtggctgctctctgcaaccatacacacacaaaaataaaccctcagggcatcagatttatacaacaaacaagattggggataaaaatgaattatgagctatgagccagattgtcttgtcccagataggacatcccttctgtgtgctgccagtgccgttctctgttctgggagaagggaacacaagaatccaaggggaagaaaacagttaagacatcaatgagagtcctgagagagaagatccttgccctgtctccaagaccaagaccgggggttcacaagagaattccaggtaggtccagagaatgagaggtccttttccatgtatgaagtttgtgaacaaggagcaagacctcaaagttttctcatgcctcactcagtatagcaatgggaggaatgtctgcatgtgatgccttgggccccctgagccccaatgtccatgcaggatgcagcctgctgcgactttgccttcactgggtcagccttgcaggttgggtggggcaggcagatgtagcatcaaacacctgacaatgaccctggcccagcagcttcgtgcctatggtgtcttggctctctgtagcccccaggatgaggatgaagccacagggaaaaagggaaagaccatgaattcacagaaatttagtttctaacatccaccagaatggagagtcagtaaaaattaggtcataatagaaatatgaaaagattacattttgtgcacaactgatttgttttgtacctactacacacctccctccttccccagggtcatggggctttttgttttaattagaaaattaaaaaatattctaaatctggaatagtgcaggtcctagaaattctggatacgtgatcttctgtatacaataaaatgtaagtttaaaggaagtaattctcttcctcaaaaaactaaagacagaactaccatttcatccagcaaccgcaccactgggtgtttatccaaaagacaggagatcagtatatcagagatacttgcacccccatgtttattgtagtactatttacaataaccaaaatatggaataaacttaaatgttcgtcgacagattaatggataagtgtggtatacacacaatggaatattattcccccataaaaaagaatgaaattctgtcatttgcagcaacatagatggaactggaggtcattatattaagtgaagcaagccaggcacaaaagacaaatgtcacatgttctcactcacggaattcacaaaggtagagagtacaatggtggtaaccagaggctgggaagggaagaggggaaagggagatgaagagaaggtggttaaagggcacaaaaactcagaagaaataacttctagtatttggaagtaccgtaggaaaattatagttaataatttattgaatgtttcaaaatagaagagaagaattataatgttcccaaaacaaagaaaagataaatgtttgaggcgatggatgtcccagttaccctgatttggtcattacacgttgtatacaggtatcaaaatattacatgtaccccaaaatttatacaacgcttatatatcaataaattaaattaagttaaataaacaggaagcaccaggaggaactcctgatgcattttatgcttaaaacaaaaaatcctaggtctttccatagataaatctaagaatgatgataaatatggtggaaacagggtctcttggtgctccaaatatcgtttcccaaaacaaaggaacaggacatcccagagtaatggctgactccgggcctgaaacagggtatgtagaagagggcccttcaatgcaccgtcacactggaaagcaaggaagccatcaaagacagccagagtgcttcaaaggactcagaaatcaacttatgaggccccactggtcaaggatggcacaaggtgagcatgagtaaggacactaactgtaacagatggaaacataccaaatagatttcatccaaaatttcataagaacactgtaaaatcactgactgcctttggagaagactagtaaaccaatttgttattttgagaactgatgagtaaagagagtgtcaagcacataccctgcctttcctacacaaagagaaaaaccagacattacgtcccccacagaagaaccaaccccacctgtaaaataaccttgctgaaaagtgtgaaccttagtccatttaagcatttggatctaataccagctcataggaaatccaggtaacagaagaacatgttaaatgacaccacaggtgtctacatctggggaagcatcagcaaaatacaaactagggggaggcctgaaggttaaaaggtaaagagcaagggaaaatatagattaaaaaagacataagaggcatgttagcaaatcacactatatgggtcttagttgatactttttcaaataaataaaaggttaaaaattacagtacaatcaaggaaatgtaaacactcgctggatacttagtgatgttgagggaatattaaagtgagataatattgtgtttttatttaaaatggggagcctatgtctttagaaatatgtttagataaaataatatgatgcttgggatttgcctcaaaataacctggaggggaggtgctatgtgttgcttctgtgttgctgctcaaatctcatgtcaaattgtaacccccagtgttggaaatggggcccggtgggaggagattggatcatggggacagattttccccttggtactgtccttgagatagtgagttctcatgagatctggttatttaaaagtgtgtggtacctgccccacttcccttcttccttctgctctggccatgtgagatatctcactccccctttgccttctgccacgattggaagcttccagaggcccctccagaagcagaagttgctatgcttcctgtacaacctgcagaaccgtgagtcaattaaacttcttgtgtttataaattacccagtctcaggagtactacctgagacctgtataaattacctaatacaggaggtactggaggtacagagaatatgagattgtccacaagttgattgttgttaaagcaaattgttggaaacatgggagttcattatactctactgttgcacataagtatttgaattttcccataataaaaagtttgtgcaaaaaaagattttttagtatgggaagtcgtttttcaagttacaagataatcactctcgataatcactcttaatctcctgagtgaagaagctatattagttagggttctccaaagaaagagaagcagtagaaatatgagttatacaagagggatttattataggaatcagctcatgtgattatggagaccaagaagtccaccacctgctgtctgcaagctggccactcaggaaatccagtggtacaaatcaatctgaatccaaagcctgagaatcaggagtcctgatgtccaaaggcaggagaagattggatgttccagctcaaaaagaaagagtgaattcacccttcctctaccttttcataatatttgagccctcaacaggttgataatccccacctgtatcaatgacaacaatcttctttaccctgtctactaattcaaatactgatctcttccagaacaccctcatagatacactcggaaataattttttatcagctatctgggtatcccttaacccagtcaagttgacatataaaattaaccatcacagaagcctaatgaaaacacgacggagacacatccttggttgttctgtgtgttctataaccaaggctgtttggggggtctgaggcaggaaccccacttcaaagctttgctgtcagaacttcaagagccagacacatccaaaagtcagctctgactaccaaccatcttccatgacagccagggtcagattcagcaaggatgacagtccagggaggttgttccttatagtaacaatttttttttgttaagaaactacaatatatatagtctgctcattcatatatataaatattatttatcaaaatagtaatattttattaagttttaaaaattaaaactctgatctctgaatgaaatgtaaattcctaggtctaatacataaggactgcagaataaagtatagtggaacttcttttttaatccaaaagaaaactattaagaagtaaatatcaactaaaaggagaaaagaataagtcctaagttaatggatagaatttatattttcttcaaccatataatcagggtataaaaagattgatgagcagcttaacgtctattgagaagaaaaataattggaaagttcttgagttatacatatgtttgctcttccattctcaactttcactggctttttaccaaattccagtgaaccataccttggtagcatctccttaaattagtgaaaagaaatataagacagactatttgaaaattaaaataaataagagcaaagtctctcctatgcatttggtgagtaggtttacggaattcagtattcccaggaggaaggagagctgtgaggccattagcagatgacagaatcataaagaattattgagaaagattttggctgggccagtctttgtcctgagtttgatatcatagcctccaagaaaaatgaccttagacttcacccacagtaacaacctgactatgacttcttctgagagagttggttctaaagaaagatcaagtgctaaataaagatctcattatagatcgttatagatcattccatcacagttagagtcaccttccatccatcctgtcagaaaagatatttctggagcatcacagatcacattaacatggccagataagaatacgatcccaagagattcctcctaaccactcccaccaataaccagtctaatatgctttccctaaagggtcttccaaccaggaggtcacatgctccagaagcagcccatcctgcccattgcagcttctgcagctccctgtttctgttctatttccaatcattgcactggacacatgagcccttctgtagaccatcagagagagctcctcaaccccttctcccaggtgtcatttacatcaggcaagaaggcatggcaaatgggtcattcacatctaagtccgcaacaaaaagcaggggttgtcaatggcatttgtacatagaaagtccccagtattcgacttgctttttcaataactattacccaaatatgtactcaaaccgtgggacactggctgatgtcaaaattctttctgaatgactatgaagtctgcccatatagtttatacccatataatagtgaaggctgactctccacattttctgtgaaattaacaactttgagaacttgcaatctaccagcattcccagcagctaactgtaggtaatagataggatgtcttacttatttagtagtctttattctagccaccaaacctcttttaaaaaaagaaatgcttctaaaactaatatttacttgttcctccagaaatactttaattggctttgtgaaatcaatggttcccttgataattgataaaagagtgtctcttttccctgtcctggcaatatcttgctttaaataacaggacagatcattctttcacaaatatgaaaaacagattttcggaaacaagcttattttattaagccatgttatttaattttacctgacatttgcaagtcatttttgctagtaagcactctacattaataccttgagttcacatagagtttaacaatatgaatttcctatcagagaaaagtacaatatatgtttggcagaagccaaagtcatgaagaattaacagttatcaaatcccaaaggggaaacaaattctctttgctcctctcttgccagctgtcatgaatccaatttgcactttcaaaattctgcctgttacccagattcgggaatgagaggactagtaacttagcatactcgtgcccaaccataccaaatccaaacatttacacacaacccaattgtcaacaaggtagaaaaagggtatcagcttaaatgattgttatatcaaacatacctagaatgtaccacagagtaagttattttcatatgcttaagtagatgtgacaaataccaatctcaaattataaattaaatggattcctgaaaaattgtactacatgaaaatctactttcccattgacattattttattttattttattttgagatgaggtctcattctgtcacccaagctggagtgcagtggcatgatctcggctcactgcaacctccaactctcaggctcaagcaatcctcccatctcagcctcccgagtagctgggaacataggcatgtgccaccacacacagctaatttttgttttttgttttgtcgtggtggtggttgtggtggtggtggtggtcgttgttgttgttgttgtgattagagtcagggtttcgccatgttaccgaggctggtctggaactccggagctcaagcgatccacccgcctcggcctcccaaagtgctaggattacaggcatgaggcaccccacctggcccgttgacatatatttttaaatacataaaacaagattcaaagttttaaaatgcaggaatcgagcagtaatacaaacagcaaatatcaaacaatcatagagtttaaggaagagtgttctttcttataagcataactcatgtgaaaatacactttgtgtgggccttcaaatctccacaacttttctgggccttcagaaacactgtttcatctgcatagagccatgtccacctgggaaattcctactcaaccataaaggcacaatccaaatatcactgcctctacagatccaggttttcctgccctgtgatcccttaagaaaaaaatgtcaacacctttccatgaaccccaaggcagaatgagggctttcctttctctcctggcccctgagaattcctccttggtagccctgagcacaagcacaggttgttgtcatcattgttgaacgctgttatctttcaggaccatggaccatgtatacccttcgggaggagatatataatgcactttggggctcagtgcctacatccgtgcctggcatctcactggtgctaagaaaacacttataaaatgagtgaccaaagaaaatgaagaaattaaatgttaaatggtatcttgaattcttaaaagcttatcatagataccccataaattggcctcaatggccaattcagaaacatttccagttagcaggttccttagatctcctagcatcaatacaggggtgtatttttagtttggttgctcttagtaaaccctgagctctctgatttcagaaaggatccacagaccttcaagaccctgaggtgctcatcagtttacatcagggtgactcaacaagaagctagagcccagggacaccccacttaagaatatcttaattggcaggctttttaaactgctctcagctgattaatgagtactaccagagggattatgtaatttacagagcaggaacagctctggaactgaaggttgccaattaaaggtatgtgcaacatcccaacagcaaattcagccaggcatgttggctcatgcctgtaatcccagcactttgggaagcccaggctgaaggattgcttcagcccaggagttcaagaccagcctgtataacacaggcaaaccccccatctctacaaaaaatatttaaaaaacacaagccaggcacggtggcacgtgcctgtagtgccagctacttgggagaatctcttgagccaaagaggtcaaggctgcagtgagctgtgattgtgccaatgcactccaacagcaaattctaaagaaatgcaaagaagactgcatatcaagggccaacacatcctcccaagcaggccatgtggtgcccatgtcacatgctcatgctggtaggagctctcccgtgcagtctttagagagctgtttagacagacggcagagcatgcaccagctttagagtctccctgataaagagcttagggctaatgtctacaggactgacatagttcttaagctccacaactctcaagaaacacaagaaacctaaggatatcaaagggctgatgggtgttgcaaggcaaagcagtgagtcagaggtggtgggcaaaaccagccaaaggaaaatgacccacaatgcttttctgtaggcttatttaatgaaaaattaaaatccactttaagctacactgagtattgatggaattgcaaccaacatgacagtagaggttcaatgttttcaataggtgaagacaagataaggccatactggaaataaattaccagtaggcctcacaagggggtgggaaattggaaaattctctaatgaatattagatggcagacagagaaggtatttttccttttgcatattttagtttgcaaattatgaacctaaacgcttgataacctagagtccatattctgcctgtcaaccttcagcctacaaaagggcttttatattatccaacattctggaatctgcttaatgcaaccaccatagcttgtagcggatgaagtaacagattggcttgaactgaagcaacctcaggaaggtataatgtaagacaggcacatggggtagtcagctgctaaaagctcttgatgtcagtgggtgcccttgtatatgaaggtttttaagcccttcctggacagtcaagtatgcaactaaagcacaacatttttcttgtaccctttgaataactatgtggcaaaacttgtttacagaatttattccaatatatcttaagaattcctaattcagctgaattaacaatttaactgctctttcttctttctgcttctatagtcatattttgctaccaatctgttttcatttattcaaattgctatacagctctgcagtgttcaccattaccaagaattattgccactttatttatttatttattgagatgaagtcctgctctgtcacccaggctggagtgcagtggcatgatctcgactcactgcaatctccgcccaccgggttcaagcgattttctcttgcctcagcctccccagtagctgggattacagacacacactaccatgcccagctaattcttttgtattttagtagagacggggttttaccatgttggccaggctgatcttcaactcccaacctcaggtgatccacccgcctcagcctcccaaagtgctgggactacaggcatgacccactgcacctagcctattgccactttctaatagcaaggtccagattttgaaaatctgaagtttatggtacctgtggaaacactcagcaaagtaggtaccaaagagatgtttacagctgcttttattaattttctttattctatggtttcagccaatgcacagaactaaaagctgatatataagctactaggttttgaatctgtaatttccaattattgttaacaaactgtcccagagaaaattatgaagacagaggtattagtccgttttcatgttgctagaaagaactgcccaaggctgggtaatttataaaggaaggaggtttaatcaactcacagttcagcatggctagggaggcctcaggaaacttacaatcatggtggaagggaaggggaagcaaggcatcttcttcataatgcagcaggaaggagaagtgccgagcgaaggacgggtggggggtgggggggaagagtccttataaaaccattagatctcgtgagaactcactcattatcctgagaatagcagaggggaaacctccctcatgattcaattacctccacctgggccccccccttgacacgtggggattatggggattaaaaaatgagattttggtggggacaaaaagcctaaccatatcaacagtcttctactttcatacaaaataaacatccatccctgtgtacatatgtttgggattgcagaaagcaaataaatttgagtacaacttaaataacatatttctcatgacaggattcccaaatgtatgtaaaatgtccttaaattgacttcacctttacatatatccttcaaaaacttatttctaatatttcaatcattcctcttaatattttgtttgcttttcacacatgaacacacaattgacaagatttaaagtcatgcatgcctaagggtaactcaccaagaaattttccatttttcctccaattgtatgaattttttaacctacacttcttatcacagttattagcatttgaatattagcatttttcacttatttctataaattaaagccaaaattctagaaataaacaattattcaaacactgcctttcagtgaaaggtagcaaagtggctacagttgaaagttcttgtcaaaggcaacaccgcacacatggctcattcagcagctgacatctgaagtctgccttgaaatcatcaatatctccaagtgtgagtaaatttaaatccagagaccctctgtacttccaggtgatagcaggacagagtgacccaaatcactgggccccttctctcctgtagccacactgggacattctcagttactcacaaagaccatgctgtctcaaattccagctttcacacaagcagcttcctcagcctagaacaaccttttcccacccatcttctccaattttcttctgggacattcctgcttgtcagttctcagcttaaatgtagccttccatgaacctctacatcagactctgcatcctccaacattactctgcacctgaggctcagcaacactcccaggcttgtaatgatgcttggcggctaccttcctgaaatgaccaacagctctacatgcacaatctggaaacccctgtcctctgtccagcccattcccattgccaggcacataacacacacccatctttgaagaaacagattaaatcaagtttaatgaaaagctcagtgaacagaatttttttctgaattattaactttccttttgtcatgcttaaggagaagagagagagagaaagaaagaaagaaagagagagagagagagagagagacatttgtgtctgcatcagggtgaagcaatacaactgggccatggaggttatttacatggcattccagtgggacaagtcttctttcttacagacaggtttccaaggccaaggaaagcaaaccaaggcatgctttggccaaacatctgcgatattttgatcctcatccatttcttcataccaacagagatctggcctctctgtgtagtagcatcaatgttctctaatattctgtgttggccacatgctcccccaaagccaaggaaacaatcctgtcttcagcggggagctggagagttgattcaaatgtaaagcagaaagcccaggttccaaaatgagagccacagtgagtcctgtgattttcagttttgaagaaagggcagtataacaaggattgattctctgcgatcaccaatggcccctgtgttagtctgttatgctgctacaaagaactgcctgagactaggtaaattataaaggaaagaggtttaattgactcacagttcagggagggggctggggagaccgaccgcaggaaacctacaatcatggtggaaggggaagcaaacacatccctcttcatatggcagcaggaaggagacaaatgagagcgaaagagggaaaagccccttataaaaccatcagatctcatgagaactcactatcacaagaacagcatgagggtaactgcccccttgatcccattacctcccaccagggccctcccacaacacatggggattatggaaactacaattcaagatgagacttgggtggagacacctcccaacaatatcagcccccttctcagctcccagatacacaaagcaaacaaccaaaaccacaggtaaggaattccatatgctttatcttaaacaataaagaaaaattttttaatttttatttaaataaatattatatttaattaattatacatataattatttatataattatatttatatttacatatttatatattatatatttatttatatttatatatttataatatatatttatatttatatatttatatataatatatatttatatataatatatatttatatatcgtatatacttatatataatatatatttatatatgtatatatttatatataatatatatttatatatgtatatatttatatataatatatatttatatatgtatatatttatatataatatatatttatatataatatatatttatatttatatatatgttatatatttataatatatatatttatgttatatatttatatatatatttatgttatatatattatatgtatacattataatatattatatgtatacattataatatatgtaaatattatatatattacatgtatatattatatataatatattacatgtagatattatatatattacatgtagatattataatatattacatgtagatattatatattatatattacatgtagatattatatattatatattacatgtagatattatatattatatattacatgtagatattatatattatatatgtagatattatatattatatatttatatgtagatatttatatattatatatatttatatgtagatatttatatattatatatttatatgtagatatttatatattatatatttatatgtatatatttatatgtatatatttatatattatatatatttatatgtatatatttatatattatatacatttatatgtatatatttatatattatatatatttatatgtatatatttatatattatatatatttatatgtatatacttatatattatatatatttatatattatatatttatatataacatatttatataattatatataatacacatttatttatattatatatttatataatatataaattatatttatatatcatgttatatttatcataaataatatttattatttcccaagttagaaataaaaaagagaggagtaataaaagaaatatgaggtccaggcaaggtggctcactcctgtaatcctagcactttggagggtggagttgggaggattgcttgaggccaggagttcaagaccagcctgggaaacaaggcaggaccctgtctctacagaaaactttaaaaattagcctgcatggtaccatgcaactgaagtctcagctacttgagaggctgaggcggggggatcacttgagcccaggggtttgaggctgcagtgagcaatgaccataccactatactccagcccaggagacagagcaagaccctctctaaaaagaaaaaataaagaaagaaatataaacttgcttctaagacaataatattaacaatgagctttttaaacaaatattttttaaaatacatcgttcagcaaattcttttttatcaaaatttttctactgaaagctaacctgatattgttgcagaggttctggagcttggctctttgcctccaattaggggtcattgtaccttagtcaccagtaggtacgggaataccaacaggcctctgcctcaatgcggtaacataaagcaatacagaaacaatttttggctttgctgcaaatgtgcataatggaaagcaaatattattaaaaagagaatcatttttagtgattaaaacaatccaaggcagaaaaaatttctcccataagtttctaagttctcatttatcatcgttttgccgcaagaagccagagtaattttatttttcctgacttctattaaaaagatcaatacatatgattccaaagagtctcggctcatgaaaagatggagcaggcctgtaatcacatatgaaagtattggttgtcattagcagaaagattgatctgaaaagacagccggcccagagtgaaaggacttaaaaatttccatcggactgcccagcaactttcaccttccagatgattaaatacagataacagattaccatattagaggaaagaattggattggggatattcagtggatacccactttagcaaagcaataccaaatttttcaataataattttgtctgatgcaaaaaaaaattaatgctgcctgacagtacaaagttattgttcaaggtacatttaagtcaaagttgttggatgaaattcttatagttacctgtggcttcagaggctctaatgaatgcacatgttcagttgactttttaaaacggagttaaggaacatattcagacaaattccgtgggcttattccatgaacagagcttctttccactgtcttcagtgagttattgacatgacccttgatgatgattgtacaaaactcacaagaactgaactcacagccatgtaaaaggctttcttcactccatagctcttctttccagaaatctacttatggtttagtaaaaatgctagctataaaacaagatggaatttttatggaaccttgaaagggcgtggtaaacgtggaaattcagagttgtggtccaaggacattgtaaactagaggtcagcgtttttaatatcttcatccttgtcccacatatgtgcaatattgacaaacctcaggatgatgttctcatgctccagagttgagagaaaagatgcaggagaggctgagaccaggagcaagagggatgctcttaacaaaatgttggcctgtacattttcaagacatctgaatatttcatcactcttcaatccctttacttacttagctgccagcaaataaatacctgggattctcacagtattcagaactgttcataattatcaaccagtgatcatttgtaatgaactaaaagttggtattggaaaaagatgccaacatccactccctagaacaatattaagagtaagtgtgcattgcatttatattaagtaccattgtttgtaatggacttcaaaagtatttgagatattttatataagtacaatactctatcacgcttctacaaattcctaaatgccttcattatctaagttttacacaaaatcccattgtcatggtatctaccagacacttcactgcatagaaagcaaaactgttttcctccatgtctaaatgaaacaaaacataaacacttgtttttatgaaaataccagaaaatgttcatgcttttggaatttcctgtaataatagtatcaggagtaaattcctctaaatacagaggacaggaataagactagccagaaattatttttagtttcccaaacttagtaaattcttgcccattttaagctgaaaggattattttcttttcttgcaactaagaaaacttctccattttactaattcagtcaatatttttaagatagcgagaaatgtaattttttccatgctttgtgtaagattctgtgtaagtataaatgtgcatggtcatattccaggctggtaatgaagacacatctttttaaagccaattatctttttaggactatcaagataataatcactgaaggggattactgccttaaaagtggagcatgatggctctccaagactagagagggctatagtaactgcccatcctggacctaatgaagggttctcagaaggtgactcttcagtcatcagacaccacaatggacagacagtctgtgatgtagctgtaagtgctcagtgacaagagcatctgttgccagctccctgtccctcctctgccctgctctgtcttgtgtatgtcttgagggaaggtctacgatatgacatcctgggttgacaatgcatcccaaggaagatggcatagcttgtacaatgttccaagacacggggctctgatttgcactgggctgggttgatggcaaggtgtataagttatatcacattcctgtcctctgtgcagagtctgacaaataaaaagtggctgaggcacaaaccatgagctaaatagggcctcaagcattctacttttccaaacaccatggaaattatagtgttaaaaaaaccaagagagaggaaaagctatagtgtagctgtattactcatggatctccagagaaacagaaccaatagaggtatagagagaaagagatttagtataaggacttggctcacataattatacagactgacaagtcccaggaactgtagggtgagttgggaagctggagacccaagagacccaatggtgcagttccattctgggtccaaaggcatgagaaccaggtgggcaggtggtgtaaattccagtccaaaggttggtaggctgaagacccaggaagaaccaacatttcacttcaagtctgaaggcaggaaaaagcccatgttccagcttgaaggacagtaggcaaaagaaattctttcttacttgggggaggttcagccttttcttctactcaggcttttgactaattggatgtgtcccactcacattagagagagccatttgctttactcagtataccaatttaagtgttactctcatccaaaaacaccctcacagaaacactcagaataatgttaactgaatatctaggcatcccatggcccatcacagtaaccacgtcaaatgctaagcaaatagttttccttttgtttgtcttaatacaagtgaaacttttgtttttttcctttttttattattccttttgtccatctggtttagtataaacaaatatttcttttgaacttcaacaaataagcaatagatggccagtaaaattgcacagaaaactcttttccctccagctaaagcaacttcaaaatacatttatttaataaaataaagaatcaataaaattttaattttaagcagtcagattcaatgccaagttgtcctggaaagaaatttgataggaatgcatgctccttcttttctttgtagcacatgtcaggttacaatctggtgcaaagaaagatgtgcagctgcaaaactagtgtcccagatctagccataatgatgtaaccttgggaaagattttgctctcaaataactgataatttgataaggtgggtaagacaaacaaaaaagacagtagactggtaactacctaaggaaggtgcaaagtactgggggaatcaagaacagaagagcccccatccaggtggacatgagcttcacgaacagtctttcagaggaaaccaccctgatttacagtaaactcacccctttctggggtcacacttgaaacagaatagctatacccacaaccactccatccagggacaagaactgcgttcattcaaactcatgccacgttgttttttctctcggctctgctcagagtgaagttcatcgtgcagcaatgagaaaagcccccataaagtcattctgacataaatatctatagacaagaactgtcaccattgtccttgcgaactcgtcttgaagaagcattccaagatgtgtgcaaggggtgtatgcctgtgtgtgaatgaggacaaggaggtgtgcagctcttctatgattcttgcctcagactaactagatagctttcctatcagtaaataagggcacactgagtatttgctgtgaaccaggctctatcatgaggctgtaaacaaagaactcagatcctgtcctccaggagcttggagtctagatggtcatagagcattaaacaaataatgacaagtgcagacataaagtatagttacaagtttaaaactaaagcctacacagctgccatacagtgattctacctctgttctatggttctaggatccactgctgcaaagaaaaggattattactcttgtccttgtactgggttgtgttgcaaacgtctgcctcagctccctgaagacagtcctgtggcctcagcatggagtcctcactcagtccctgggaccactgtactaagcagtggttcatagcctgtgtgagcaaaaggatcacctggggtactagagggtagatacctggcctcactctcccagaaattctgattctgtggatctatgctgtatttgaaaaagccacctgagtatttgaaaacccacttcacataatagcagacagtatatgaaccaccccaagaaaccatgtgagaccaatgaactaaagaccaatgaactaaagcctccaattttccttatccagacaaattaaaaatgtaatttaattgatatgctacattagtttcagaatatctcaaaaaacatatattcacaaaatagaataccttttcctgccttcaaaagacagtaagttgcaaatgattacattctgaaaatagaggaatgttcacaatcctgatatttaaactctttgtaatgaggttttttttagtatataactttaatatgtgctccaaatgaataaaaagattattcatttatcattcagtttttttaaatattaactggtaaatccctcttttaggaagcataaataaatacctaagtgtaaaaaatatgctaaaccaaatactaaatactgccaacaattcataatggaaataaaatcagcttcaaaatccaagctaaaccacagattaaacagagggttttcatgtgacctcgaaatcaattcttttgttttcttttgccatttttaataacaaacaactgaatttttttaaaaaacatattttcataaaattgaatgttgttctttcacataacattgattctaaggcaatgtcatcaatagtcacaagtaaaagaaaaggaacctccaaagccataaattcgattggaactgagataccaagtttgtgagtaaagatcagcaaataattttttacaagatattaagacttgtaaggcttaagatataagcccagaatgatacaaacttagacggacaggcaggaagagtaggaacaggaaaaacgtgtttcccaacatgtcattgagggttattattaattcagaaaaaggaaattttgtgttaaaaatttcaaaacaatgaacattaaaactgctcagttgcaaggtcagcactgaaaataaatagaaatggaatcattatttcaattagtgaacagttatcatgtagatgccccagttctgatacagagatctatgttagagacacagggtaagtaatacacgcactcaccacctagcctgcaaagtgacagacagatgtgcagttcatgttggggcaagatgtctattgcactggtcctatgaagcagtgattcagaaacagtaaagagggcgtggtgacttcttcctggggagtatgattaggatggcctcacagaggtgagtatgttgcagattttgggttgggcaagtctctgggtcaaagcttcattagcttggggcagttgcttgtttaatttgcttggagttccttctttggacttcgtcttgattttcattacaaattcttcctggggagtccttcacgtccatgtgttcagctatcatccacatgtttatgactcccaaaactatgtcctgaaacaaaaacctccttcctgtgattcaaaatcacagccaaattgccttctggataaactacaggcctctcaaatttgacacttgtaaatcaaaattcattgacttttcccctatccctgccctcaacccaaacctctacatcctctgttacttgccttttcaatgactcgcacagcccctcaactagtgcctaagacagaaatcatacgtaatctcagactccttcctcttctctccatatcccagccaccaagcctggcctctcccacttaaatcccacattcctcttattcttccacagttgcaatcataattgatgctctcagcctggtttacctggtatctctgtctccagtctcattcccttgcaatccacccttggcacttctgccatgatggactgtaattgacagctgatgattttgtttctcttattaaaatcccccagtgctgtctcaggataaattctgtactcctcatgaataaattctgcacctttcatgaactgaggcctctcatccaccatccttttttcgcactgccccaggtaggcactcagagctcttcccatacaacactacttcccatgccttggcatacaccgtcttctctccctttctatcaacagaccaccttcttggccagcccaacctctgcccagctcagtgacttcctcctttggggagccacctctgacatccccaggctgagtcaggtcaccctcttttccccctgcttcctgtggctgtcactattgaacacaccttccagggttggtagtactaggactctttgtctgcctcctgcaagctgacatgtgaagctcaagggcagaactgtgttctgttcattttttttttttttcttttcactttaagttctgggatacatgtgcagaacgtgcaggtttgttacgtaggtatacatgtgccatggtggtttgctgcactcatcaacccatcgtctaggttttaaagcctgcaggcattaggtattcgtcctaatgctctccctccccttgccccctactcccaacaggcccggtatgtgatgttcccctccctgtgaacatgtgttctcattgttcaactcccacttataagtgagaacatgcagtgtttggttttctgttaccatgttagtttgctgagaataatggcttccaacttcatccatgtccctgaaaggacatgaactaattctttttttatggctgcatagtactccatggtgtatatgtgccacattttctttatccagcctgttcatctttatagtccttgtgcctaccacaaagcttaacacataagaatacttcaactgtttgtggattatcttaattaagcaatgccattcactgaatttcatgattattcccattcaaaaggaatagttttaaaacctcaggaagcatgtgactatccaacaaattatacccctcgaaaacaaactaccaacagcgaaactccacactttcaagttatataactatcatacaaaagcaaccgattagtatggaacatttgggtcaaccagttgtttttttctacattgtaccaaacacttgatttggtggtggtggtggttgtttaagtgttgcttaaaccattatattatctcaggcttgcaaggcagctgagtcaatggagcagttgtttaagtatcatgtggactcagtgtgcagctttggcagatattactgagttactgcaaccaattctcaccagtgcttttttgagcatctacttcatagcagatgaatccacagaccctacctccatgtttctcagaatcttagcccctggaccacctttatccaactcacctgagagtcttgccagaaatgcagattctggcaccctacccacaatatcctaaaccagaacctccagaggcagggcctggccatgtgcattttaagaaggtccatcctactgatataatccaaactcaagtgtgagtggcactggtctactcttcagtcagtcctacagaaagtgtaaagaaaggataaagaagtagggtgatgagggagtgaggggagccaagcaggagagtgacgtggtagaacactggaacagctactcacaaagagatccaatacagtaatggtatacacaaaaagagtttatttctgtttcacataaaagtctggttgtatttggtcctgggcttatacagaggtatcatggtgtcaaggactcaggattcttctatttcttctattagcgcttttcttctattagatcttctaatactttgtggttctgccatccttagggtctttctcttaatctataaagtctaagagttgttcattatcacctcctcatttcaaccagacagaaggaaaggaagagggtcccttccccttaaaagcactagccagaaggtaccctcgccatggctgttcatattccacagtttacccacctatctccgtccaactacaaaggagagggagaaatgtactggggaaaggagaaacccgtgtgcccagctaaaatgtgagttctgtaacaatggaggggaaagaaaaatagataatggagtcaacttgctgcctctgtcacctgagaggagaaggggaagcgggaggggaagagtaggaaggggaggtaaaagggaatgaaaaagaatataaaatttactattgtccatttttcaaaagcccctacccctgcccacccaccgccacacatctattctagtctgctgttcctgattttctaagcttctttaatcaagcctgttgcattcactttcactcacacccctctagccttggccttggacattgactttgattggaaaacaatctgctgccaattcttccaatattatcagcataatgggctgcaggcacaatctgtttctcaaagttctctgctttatgttaaaagtcaggggcccaaggatgaatttcaaacaatagagttgccttatttgcggttcgagatggttggtcagtcagccctatcccagcactctttgtaggtgaatgatgtgggcagtgttgcagacctgtgcttgatgaactgaatctccacgtgcataatcaccctgactttcaggtgaaaactgccctggtttatagtctggttgctggagaaagtctaaagtgtgaaggaacaggtagcctcagtgttatccggacactctagctaccttcctgtggagtaaggattcccatggcctcatgcccaaagtgctgacgtctcaagaacaaccccctccagcctttcactgacctaagatgaaccatgtgacattcattccatggatcagacatcaggtcagaccttattgcttttggacagcagccattacatgatttacggagcaaaggataggtacaatacaaacctcagagtacgtgacaaagttagagggtatttctaagcatgaaaatatgcaacatttcaggagtaatgtcataaaaagagggatcagaccaacagatcactgtctccatttaactgtaatctctaaaaataactttagctctcatttctgagtcagagagaaactttagaagttacattcatgcttttaggaggcaatatgtaacccaacttctccaaaactaaacttaaatataatctaagtcagaattcaatcccccaaggagatttcagtatagactcagattcacaaagcagaggaagagataatgtggttttattccaaagcgcagacttaaacacatggcaaccctcatcattctcaaagttcccaattgcttcatttgctcccaagagtcaagtggcttctataagaaaattacatgcggtcagaaaattacaggaggcctggttctttgggagtaatgatccattcatttgataatttgctaaatgcttactctttctgctcgtcattttttcctcctggttagtacatcatgcatatggtgacaagagataaagaaatggacaagctcccagaaaaaacagacaagaaatgggaccaaaaaaagacataaaatgtcttttaaaataagcttaatattttgaaaaatgccttttatgaaaaataccagtggaataatttagatgtacccttgtagcctcacagatgctgatttttcagatggtggtgccacatacccccaccactggcatggatcccactgcaaagggcctctggggacatccaagcacaaccctgaatagacatctggccatagacaaatcctccttgtctccagagacttctacaggattccaactctagtttttaaaatgtgagtatatgagacacatgggtctgtaggctctggttttagaggtgaatccttcacattaatgattctgagattgattttctcctttgttggcccttcttgaccatttttaccttctcagtgaccacgtttcagtgctcactaggacctggaccgggggcagggtaaaccgaggtaagtagctctgtgttactgcctgctactatgcccacggatgtgtggtgatgagaagggtaaaacaaaaagccagaattcctttccaggatgaaataaatgcaagataagcacagggagctgctcaggtgcctgaggaaggtggccaactccaaatgtccacaaagtgtccatgtcaggtgacccaaaggtgcaaaaaacaggcagactgcttctgtgcccagtagcaagaatatcaagtacgtcaggtctttttggtgtggcttaatacagcctacttaaaaggaaaaatagaaaatctatgtgaacagtttccagctgccagctctaatttcccatgatggcccatgacaaggagtgcacagtgttattgatcagttatgacattatcagaaaagggctgaatggagtttgctctcactcttttctttctctttgctctttgtcagtgtccttaggaaatgtatctaattcttaggcttctccagccaagcaggatgggcaagaagacatttatactggatggcttctaaaaacatgttataccagtttcaatattttaggaaaataactgtacaataatccaatattaacagaagaaagaaaatattcattcaaaagtgcctatatgctcatgtcctatgtatttcatgtcttggaccaaaatattctattcttctcatgaaaccacttatagttaccaagctgaaaaatcaaacagacattatgttttagcaaatttcttcatttcccttttgagttctttggaaagaagagaacaaagtgcagagaaatacttattctctaggccataaaatcaggagggcaggcctgtgatctattgaatgttgagcaccaagctcagtacctggcacgtaatagttgctcaataaattttgttaccacatgctgaatgactccaacaagtaattagatttttctgccactcccctctattcaaagctctaacaaagaactttttaaaggtgtgagcccatggtctctattaaagagttttccattgcaacttttcttcttctaactagtagctttctcttgtatactcaaaagtcacctcgtttagcttagtcatggagcatagaggtttgaagtcatgcaaacatggattcagctacctggttctgccacttgctagtgtcattacaacttcagcaagttgcctaatttctctgagcctcatttttcccacctataaaggaccataatatttccacaaggctatctatggattaagtgaataatatgtacaaaacagctcacaaagtgcctgataatagtctatttatgatgaccactttattttaaatattgttataatcattatcatcactggtatccactggaagctttagaataatcctatagcatgctttataattaaaacactgttatatatctaattaagaaagttttcttgctcatacatttataagctgttcttttgtactgtatgataccaaaggaaagttacctatagtttttgtaatattcagggacagacaatattcaagtatgcaaattcttgaatgcaaatttctttaatgctttctttagtagtctatacaaaactttaatatatatgtgtgtatatattatatataatatatacattacatgtattatatatacacatatgttaaatatattatatattataaattatattatataattaaagataatatattaaaatatgtaatctataattatctaataaatcattatatatattatataggtcatgtgtagtggttcatgcctgtaatcccagctctttgggaggctgaagcaagaggatcctttgagcctaggtgttcaatcccagcctaggcaacatagtgagacccagtctctaaaaataaataaataaaataaacaataaataacaaataaataaataaaataaacaaataaaattatacatatactatatatatgtacatattatatacatacacacatatatatataatttgccattataagctagctgtaactttcccaaggtcaacagcctgtcactggccacaaaacacaaaggagaaagtagtatatatctacacatcctccaaagcctaaggctgcaaatggctggcatagaaaacatccagtcctactgtacctgaatactccctctagaaggttcttagaatgaatcaaaggtgaaagagggcatacatggaagccattgaccagcccccaactccatacatactgcactccatcctttagaggcataataattggttcattcctacttgcaattcagaaatattaattgagcatcttcaatgtgctaaacactgctttgctttcaatgatggaaatgaagtggtaagcaaaacaagaaaagtgcctgccctcatggagcttgcattccagagtaatttgtttcttggtagcaagaacaaggaggctgagtaacagaccttacagttggtgtatgatatatttttcaatctttctaaaagttcttaattatctgctgtctaacttgtaagccaaatttcattccttctgtgcagaatgacatggccagtctgaccaccaaatacgatggggctttcttaactattcaagtacactgttggcaaaagatagtgggctattcaaaatgacatgccgaaacatgtatggtgattttaatcaattattttggccagtttcaaaggcatttatcacaaagtaacacagtcttgctaaaatatttctttaaacacagagttctttgttcctacacctttaagaagtaaagggaatacccagacactgtacctgttttgtaagttaaagtgaaaacatactgcactgaaacttatagttgatatctcttcagaagagaaattcatcagcaaggtaataattcccagtagctacacaaagaaaccacagtcttcagaaaaaccacataacagagaatggaatactgtgagcagcccacataattactcatgatagataagtgtattaaaaattaaatataaattattgcaggcattatagttttggcacaagatgaaaaaagtgctttatgttacttaaaagttttaataactgccttaaatttggctcagttgaaaataagcttatcctgagtaaatataaagcatttattatttgaagtattgctttcaatacaattgtaggtttaaaaaaaaacaacctctttgattttctaaaagttgctatgtggcattgatcttttttaaaagtactaaaaagagatacaaataggtgaattttaaacagggttgttctaaggaggattactttaacatatgaaaatctcttaccaaaactctgctaaatcctaaaatcaaatccagatgattttgaatctaaatgtgagaggggaaaaaataaatcttttaaagaaaaacataagagagtatcttcatgaccttggagtaggcaaagagtccttaaataacacaaaaagcactaaccttaaaacaaaaaagataagttagattatattaaaattaagaatttctgtttatcagtactaagagagtgaaaagaaacccacagagtagaaaaagatgcttgcaatacacgtctccaacaaagaactgacactcagaacatataaagaattcctggcctggtgccgtggctcatacctgtaatcagcactttgggaggccgaagctggaggatcacttaagcccaaaagtttgagatcagcctggttagcatagtgagaacttgtccctactaaaaaaaatttcttaaatttagctgggtacagtggtgtgcacctgtagtcccagctacttgggaggctgaagcaggagatcacttgagcacaggaggtcaagactgcaatgagctatgatcactctatgcactatagcctgggcgacagagcaaggccctatctaagaagaagaagaaagaagaagagaagaggaggaggaggaggaggaggaggaagaagaagaagaaaacgaagaagaatttctacaactcaattcaataagaaaaagaaagacaacaatagaaaaatgagcaaaggactttaatacctacttcacatagaacgatatcctaacagccaataaatacatggcaaggagctcaccttcatttgttgtcactgaaatgcaaactaaaaccacaaggagagacattatacttccatccaagtggctgaaattttaaaaagaggcaaatacccaatagagcaactgacattcacatacactgctggtggggatgtaaattggtacaaatactttagaaaactgtttggcagtatctgctaagcagaggtcttcaaaatgtggtccctggaccagtagcaaaagcatcacctggaatttgccagaagcccacattcttgggccctactccatacctactgaatcagaaacactccaggtgtttcccagagatctgtgttttaacaaaccctccaggtggttctgatgcgtgtgcaatcttgagaaccactgtgctaaagctcagcatatgcatagcctctaactcagaaactgtactcttaggaatgtctaccagagatgtgtatgagctttcatcaaaatacatgtacaagagtgtttgcagtagcactactcaaaacagccaaaaactggaaactatctgatatggtttagctgtgtccccactgaaatctcatcttgaattgtagctcccatgatccccacgtgtcgtgggacagacccagttggaggtaactgaatcatgggggagggtttttcccgtggtgttctcatgatagtaagtctcacgagatctgctggttttataaagggcagttcccctgcacacgctctcttgcctgccaccaggtaagacatgcctttgctcctccttcactttccaccatgtttatgaggcctccccagccatgtggaactgagagtccactaaacctctttttctttataaattacccagtctcgggtatagcagcatgagaaggaactaatacattacctaaatgccatcagtaggaaggacaaacaaagcatgctatagtcactaagtagaagtctacacagcaatgaggctgcataatctataattgtatgcaacagtgtagatgaacctcacatacataatgatagacaaaagaagccaatcacaaagctacacatcttgtaggattccatttgcagaaagtacaaaaaaaggcaaaacctgactctgctattacaagtcaggatatggttatgattgggagagaccagtaggtgaagactgcaagggctctaaggaaggcttctggatgctcccaccattttttttttcttgagctggggttggttacagtaatgatctgtttatgaaaatgcactgtgctgtatgcttataatgtgagcacttttctgccagtatacaacaatgaaaaggttttcttaaaacttgattaaaataattcttttcaaattgtataataagtgtgaattactttaggtagaatatttgcattggaaaaagtttaggacattaaagagtaatgtcctaatattccactccagggaattgtcatcaatatggcagaagaagaaaaaagcttacaagatcaaataccaatgaaatcttccctgaatgactgcatcaaggtactaaaaatggtccctggggtcagactaaacaacagaaacccaccagtgggcatagttcgtcagtaaatctgtgctttaataattaaaatgtaagcactatatttatataccccttaattccataagaattttcagtggttgtaactgcattaacccactcatcagtcaggttaagcagccatcagcggaccatgagaagcaaaggggaaggtcaggcacattaactacctgatgtttgcttctgattaaagttggcttatttatttatttatttattttgccagcagagtcagtgaatttttaaaaagacaatgattgtcatctcatctctgttgtcagcaaagccctcattccaccttgagctcccttttgagtagccagggctctgggttacacatgggctcattctgcttttaccgacaaggatgctgcattagtccattttcacgatgctcataaagacatacctgagactgggtaattataacaaactgtctctcagaccacagtgcaatcaaattagaactcaggattaagaaactccctcaaaaccactcaactacatgaaaattgaacaacctgctcccgaatgactaccgggtacataacgaaatgaaggcagaaataaaggtgttctttgaaaccaacgagaacaaagacacaacataccagaatctctgggacacattcaaagcagtgtgtagagggaaatttatagcactaaatgcccacaagagaaagcaggaaagatgaaaaattgacaccctaacatcacaattaaaagaattagagaagcaagagcaaacacattcaaaagctagcagaaggcaagaaataactaagatcagagcataactgaaggaaacagagacacaaaaaacccttcaaaaaaatcaatgaatccaggagctggttttttgaaaagataacaaaacggatagactgctagcaagattaataaagaagaaaagagagaagaatcaaatagatgcaataaaaaatgacaaaggggatatcaccaccgatcccacagaaatacagactaccatcagagaatactataaacagctcaacgcaaataaactagaaaatctaaaagaaatggataaattcctcgacacatacaccctcccaagactaaaccaggaagaagttgaatctctgaatagaccaataacaggctctgaagttgagccaataattaatagcttatcaaccaaaaaaagtccaggaccagatggattcagagccgaattctaccagaggtacaaggaagagctggtaccattccttctgaaactattccaatcgatagaaaaagagggaattctccctaactcgttttatgaggccagcatcatcctgatatcaaagcctggcagagacacaacaaaaaaaagagaattttagaccaatatccctgatgaacatgaatgcaaaaatcctcactaaaatactggcaaaccgaatccagcagcacatcaaaaagcttatccaccgtgatcaagtgggcttcatccctgggatgcaaggctggttcaacatacacaaatcaataaaggtaatccagcatataaacagaaccaatgacaaaaaccatatgattatctcaatagatgcagaaaaggcctttgacaaaattcaacaacgcttcatgctaaaaactctcaataaattaggtattgatgggacgtatctcaaaataataagagctatctatcacaaaaccacagccaatatcatactgaatgggcaaaaactggaagcattccctttgaaaactggcccaagacagggatgccctctctcaccactcctattcaacatagtgttggaagttctggccagagcaatcaggcaggagaaggaaataaagggtattcaattaggaaaagaggaagtcaaattgtccctgtttgcagatgacatgattgtatatctagaaaaccccatcgtctcagcccaaaatctccttaagctgataggcaacttcagcaaagtctcaggatacaaaatcaatgtgcaaaaatcacaagcattcttttttttttttttttttttttttttgagacggagtctcgctctgtggcccaggcgggagtgcagtggcgcaatctcggctcactgcaagctccgcctcccgggttcacgccattctcctgcctcagcctcccgagtagctgggactacaggcgcccaccatcacgcccggctattttttttgtatttttagtagagacggggtttcaccgtgttagccaggatggtctcgatctcctgacctcgtgatccgcccgcctcggcctcccaaagtgctgggattacaagcgtgagccaccgcgcccggcccacaagcattcttatacaccaataacagacaaacagagagccaaatcatgagtgaactcccattcacaattgcttcaaagagaatgaaataccaagtaatccaacttacaagggatatgaaggacctcttcaaggagaactacaaaccactgctcaatgaaataaaagaagatacaaacaaatggaagaacattccatgctcatgggtaggaagaatcaatatcgtgaaaatggccatactgcccaaggtaatttgtagattcaatgccatccccatcaagctaccaatgactttcttcacagaattggaaaaaactactttaaagttcatatggaaccaaaaaagagcccgcattgccaagtcaatcctaagccaaaagaacaaagctggagacatcatgctacctaacttcaaactatactacaaggctacagtaaccaaaacagcatggtactggtaccaaaacagagatatagaccaatggaacagaacagagccctcagaaataatgtcgcatatctacaaccatctgatctttgacaaacctgacaaaaacaagaaatggggaaatgattccctatttaataaatggtgctgggaaaactggctagcaatatgtagaaagctgaaactggatcccttccttacaccttatacaaaaattaattcaagatggattaaagacttaaacgttagacctaaaaccataaaaaccctagaagaaaacctaggcattaccattcaggacataggcatgggcaaggacttcatgtctaaaacaccaaaagcaatggcaacaaaagccaaaattgacaaatgggatctaattaaactaaagagcttctgcacagcaaaagaaagtaccatcagagtgaacaggcaacctacaaaatgggagaaaattttcgcaacctactcatctgacaaagggctaatatccagaatctacaatgaactcaaacaaatttacaagaaaaaaacaaccccatcaaaaagtgggcgaaggacatgaacagacacttctcaaaagaagacatttatgcagccaaaaaacacatgaaaaaatgctcaccatcactggctatcagagaaatgcaaatcaaaaccacaatgagataccatctcacaccagttagaatggcaatcattaaaaagtcaggaaacaacaaggtgctggagaggatgtggagaaataggaacactactcaactccactcttgtagcatgagaaaagtcatagacaccacataaacaacagtgcatgtgactgtgttccacatcgtttacaaaactatctacaaaaacaagcagagggctgggtttgatctgctggccatagtttgcaaatgcctactcttcgagttgatacgaacattactccttttaaaggagaccagactctagaatcactccaaatgcagggaaatattttcagctatccaaaatcaatcacgggcactagttgctggcctctgacctacatcatttcaggtctgcactgctaataggtgtcaggttcagaggctggcacgggcgctgttcttgaatggtcctgagtacacccacccatgtgagcaggacaaataagtccccttgaagggaggcacctgaggaagcctaccggtctaagtgcgcatgaatgtaggtgtgaaaacacattatctcactcagcagagagtacagctgggattgcccaagtgatgtggtccctatgatgtaaaatatgaaaatgtcttccaactagtttcatcaatgaaatctttgtgggtgatttcttttaagccattacttatgcctcttgaatcgtgtgtttgatttcattgggtaattatttcgctagatacaagggaccctgtcagaatatctttactgactaaaaacaagctatgcttttggtgccctggaaacatataacaatactatataatattaactaagccaaggcttagctgggaagttactggatctcctgttccttttcaacactgtttttgccccttctcattgtcatccttctcactcttccctcttttccaaccatgttttatgtttctgtccctctttctcttgccttaaaccaatcaaaaccaaacaaataaaaggaagtagagagcagcaagacttcatactgaaaacgtccttaaaggaaacggctttcacgtttatcatttttttcattattttgagtcagtttttgagagcaagaacatatatctttactatattaaaaatcagagtcactctaaccatgtaataaacccagaacatgtattcatggtaactatacctccagtggtttatgatttaaactcagaaagtttctttaattaatctctgctatgggtttgatatcaatgtcaattaaaagcagcacatgatgacccttatgcaatgagataagaataagaaaactgggaggctgaggcaggagaatgaggcgaacctgggaggcggagcttgcagtgagctgagatcacgccactgcactccagcctgggcgatagagcgagattccgtctcaaaaaaataataataagaagaaaacactaatatattggtctgacatagaatatgcaaatttgttcattataaaaataaatatgtctgttgaaaggctggcaaataaccaatggctcactgataataccctctaatcccaagaaaaaaacatagaccaaaataaaaagaaaataaacttcgtataaagatgagaaagcaaagtgtccccttgttacgtaatattagaatgctctctcatacctacggttgctttcgttctatgtcaaatgaaattacgctgcccacctgcaggtgctgggaggaacaagttagaggctccatggaaaagcatcttgaaaatagccgagtgctctgcaaatgcagatcgttatttatgcaaaaaaaaaaaaaaaaaggcaggaggaaatccatctgttctaaaacctctcccctcaatatgcttccttattatctacacgaattaaagatgggtttatcaaattcgcgtttacaattatgggatgtgggttaaaataatcacacacacaatcagaacccatggctgactacttacaacatttcctttgtcattctgtctaggatgagattgtgttttgttattgaaccataaaaaatgtcattaacccttggttcattgttaattcttagaaagctagaatcctttttgtgtctttggaatccctttcacacacagccagttggatagaaaatagaaggtacctgagaggtgaggaactgttagtgaattgatgtggaagcttctaaaggcattgctcctgaaatgacaagtttcagcaggaatagaagctgagggccttcccaccacagatggccagattgggtgccttctgagcccactgtctagctcaagccctagcctgtcaatcctgaaaataccagcaagtactgtcctcctgctagtagtattatatatagtgtgtctcacaaagacccagaggggtcagatgaatgagagcttaaagtaattcgcacactcctgagccaacagtcctgggctccaacccctaggccatcacttaaggctctgagaccccaggatggcactcagcatccaggcacttcacatcctgtgaacatctgtcatgctttggacacacacacgcagacacacaccaacacttcttaaacactctgcctgtgtttagggctatctctcccttatgggtcttctctcccctagaaataagccagaacctcatttcccaagacttccttgcatctaggttgctgatatgtgatgcaagctttgtggatctgacacactcccaagagactttaaagcagttgagagcaatgtggacaagcatgagtgccctacaatttttttctgttgtgagagaggaaatagaaggctccagctttggagaacatcagcaaaaaggtctccacattagtgataaaagctgtggtatctctgccctgtgaaggtggcagaaggtcatcacagactttccacccttacaagagtctgaagtacccaatacatcctatactaacttccatgtatacttaagcaaattagagtatgtcccgctgctgaacaaactcggttgtttcacttatcaaatggaaataataagaggtgcatcaaaaaatgttaagaatcaccaggaacacccagctcaaagcacctagaacataggcaaaaagcacacgtcgaatgtgagttcttcccttactttttgataatcaatacttttatttttctatttattttcttactattaacatgttatgtcttcttttactacctttttaatggttaacctgaagattacaacacacttttttttttttttttttttttttgagatggagtttcactattgtcgcccaggctagagtgcaatggtgcgatttcggctcactgcaacctctgcctcccgggttcaagtgattctcctgcctcagcctcctgagtaactgggattacaggtgcccaccaccatgcccagataatttttatatttttagtagagacagggttgcaccacattggccaggctggtctcgaactcctgacctcaagtgatttactcgccttggcctcccaaagtgctggaattacaggtgtgagccaccgtgccaggccacaacaggctttcttgatttatcacagtcatatacacagtatcattttatcaccaattttactagaactttagagctgtctgactccatttacctcgccatctcttttgctttactgctattgtacacctaatttattgcatcagttttaaacttcatgagactttataattattgctttgtacaatcaataattacttctatttagcctcttgcttactcatcctagtatgttcatttcttcatgcgaccatttggaattgttttccttctgcctgaagaaaaaaatgttttctttcagtacagacctgctagccatattccctccattgttatttctctaaaagtaccttcccttcactttcactattgaaaatatttttcattctatttctgtggtgggttttctttttcttcacttgaaacatgttttattgtcctctggatgccactgtgtctcatgagcattcagctgtcagttttgccatggctttttgaagggtaatgtgtctttttctgaagttgttttggtttgtttgtgttttttgttttaagttctgggatacatgtgcagaacatgcaggtttgttacataagtatacgtgtgccatggtggtttgctgcacctatcaacccgtcatgtgggttttaagccctgcatgaattaggtatttgtcctgatgctctcccttccattcccccgaccccgtgacaggccccggtgtgtgatgttcctctccctgtgtccatgtgttcttattgttcaactcccacttatgagtgagtacatgtggtgtttggttttctgttcctgtgttagtttgctgagaatgatggagggagtgtaaattagttcaaccattgtggaagacagtgtggccattcctcaaggatctagaaagagaaataccatttgacccagcaatcctattaccgagtatatacccaaaggatcagaaatcattctactataaagacacatgcacatgcatgtttattgcagcactatttacaatagcaaagacctggaaccaacccaaatgcccatcaatgatagactggataaagaaaatgtggcacatatacgccatggaatactatgcagccataaaaaagaatgagatcatgtcctttggagggacatggatgaagctcaagttgtttttaaggtttgattttttttactttggccttcagcagttttactatgacgtttctaggtatgtttttgtttgtatttctatcattcaaaatcccatgtgcttcctttttttttgagacaggatctctgtcgctcaggctggaatgcagtggtgtgatctcgactgactacaatctccacctcctgggctcaagcaatcttccctcctcagccccccgaatagcagggactacagatgtgccaccacgcctggctaattttctgtatttttgcagagacgagtttcactatattgcccaggctggtcttgaactcctgggctcaggcaatccacctgccttggcctcccaaagtcctaggattacagggatgagccactgcacctggcctccaagtgcttcttgaatctaagggttcagtttggtaaaattctcagccattatcactaaaaattttttcagctacattatcttcctccattcactcagggaattcaattttgtatatattcgaccttttcagcatatttggcatgggtcttacacacctatttttttttaaatctggccctacgtgttcattggtcctgtgttctgctgtgtccagttaactgctaagctcaatatactcctaatttcagatattgtatttttcccattatagaatatccatttgatttcttatagatttttagtatgtggcaaaagtctatccttttatctgttttgtccattttctctatttttgagcatattaatcatagttagctttaagtccttatctactatttttatttttattttatttttatgaaacagggtcttgttctgtcactcaggatggactgcactcatgtgatcacagctcactacaacctcaatctcctgggctcaagtgaccctactgcctcagcctcccacatagctgggactataggcacacatcaccatgccccgctaattttttaatttttttgtggagatggggtctcactgtgttgcccaggatggttctgctaattttaatatttgatcatctgtgggtctttttatctgtttttctcttgcagccaaattataaaacatgcaaaagtcaaacttgggaggctgaagcagatcacttgagcctagaaggtcaaggctgtgatgagctacgatcactctactacactccagcctgggcaacagagcaaggctctatcacaaaaatcaagacttttgcatgtctgataattttccattgtattccagacattaaaaactgcaaacactccaggtgactttatcatccactaaggagaattttctttcctctattaagtggatattgtaaaggactgatcatttcaatccaatcgtgggttaagctgaaaatgggttaggttttggtttttgtaagactcatcgtacctctgcttttcctccatttctatgatatgggaatcctagcgttcgtggtgatgctggtggggtctttggctcttcagccataaaggatcccgggagtttcagctttgcccttcagagatgttgaccttagctctctatcttcccactagtgcagccaaaaatgtcttgatggggagactatccaaccgtttgtttctcattccatacccagaaattggtcagtgaccccagaggggtggagagtagatggtaatggccagttcatcctaaaaggattccctccttgctttcttagatctctgtgcctacaaaaatatgctttttgtaaatttaaattgtatctattttctcccaattgttgcagcaagagcactggccaggaccttccacatcctggcaggaggtcccccgccctcctttgtaacaaatgatctaactggtgacttgattcttattaagcaccctgaaatttttcattaataacagaagaaattggaataaaagcagatcccagacaacttgactgttgggttttaagaaacatttaaaatggtgtttgtttcattctcagatctgaagaacattttatttggaataagaaccactttttacagacagaccaggttgacagaatttaaatcacaatttccagttcagtttcaatttaatcattccatttatacaaaccacaaatcaaaataaaaccattgtgacagaagagaaccgttttgcctataaattttatccttgtgattaagacatgcttgtaataaattatttggtttttgttaaaacaatattgattcacgttaccccaccctcagtcagaataagctccacactgacataacagaaaaagaactgattgttaaaaacctggaaagcagccaagtttacaatagattgctcctcctgtttataaaaagctgctataactgattattgcaaaaaatttcctccaagcaatgcacacacaagttgctgccttgagaaatatggaaagttagaaattagaactttacatgtagtgtataaatctaatcagtgcaaggaatgagtgctgggaacccacaaaatactgtagggaagacttcttgcatggccctttattcttaggagtacaatgactcttggagaggatcagtggcgcttctggcttaaaaatgcaacaggggcttgtcatatttaggtgatgaactacgtgatgtttgtgctaatttctgaccctttcccatttccatggctattcgcccttttcagaactcctccacaaccacctaattggtgtcttctttcgccctaaattcctgaggcccttgctaagtcctacccttttaaagttataccacttcaccttcctaaacttatcactgccctccccttccaccacactgctgctgctacctgtgccttccttgggggagacttgcaaggagagtagaatagaaattcagaaaataagcattttaaggcccttctatcttaacagggaggcacagcccaccttatgtaatgcaccgggctagtcctggccagattaattgaggaaatgggtggttgttcttgcagaatgagctgggagaagaatgctaacattaattgttcacagtttccagccctttctttggttgtgccttctttatcctgtcatagctggtaaaaaattcaaaggccacttttattttttcaatcaacagcttgacaggatctaataaaaatgcaatccctttaatggacaggttaatgcactggcgaattgaggtctagggcccctatacctggcacacacacaatctttttcctgaaacagctcttcccttcccatcaaagggtatgaattatttgtccaaacaatctcccactctaaacttaatacaaaagcttggttggtgttgaaatttgggtggggcccaccaaatctaaagctctatagttcaggggaaaaagccgcatagtattctagaatatcaaatgaaaccaaaacactctacctgccaagcatttccagcagccaaataccaatgttagattgaggtggatggttcaaacctaacaaggtcaaagaggtgctgcttaaagagctttcaatattgtttctttaacaaatggcctgtttccttgttctttcatcaagcagagttttttccaaagtttcaaggtctcaaaatgtgtaagtcgctttttccatattttgtttcgacataaatatatttatttataattatttaagttacttttacatattcgggaaaatatacatctttttcaaaacacattatatacgcttttactgtccttaaaagatggcatatggggccgggtgcagtggctcacgcctgtaagcccagcactttgggaggccaaggatcacgaggtcaggagatagagaccatcctagctaacacagtgaaaccccgtctctacaaaaatacaaaaaaaattagccaggcatggtgctgggcacctgtagtcacagctactcgggaggctgaggcaggagaatggcaggaaccctacccaggaggcagagcttgcagtgagccaagattgtgccactgcactccagcctgggcaacagagtaagactccaactaaaaaaaaaaaaaaaaaaaaaagatggcacatggaccaggcatgatggctgacgcctttaatcccaacattttcggagcccaaggtgggtggattgcttgagttcaggagttcgagactagcctggacaacacggcaaaaccccatctctacaaaaaatacaaaaattagtcaggcatagtgggcccacctgtagtcccagcaactcggaaagctaaggtgggaggatcgtgtgagaccaagaggcagaggttgcagtgagccgagattgtgccactgcactccagcctgggtgacagagcaggaccctgtctcatagaaaaggtagtatattgggatatttttgcccatacaggtgaatgaccagactactgagatgatgactaaatgacagcccatcttctttggtatgtccatctctgaccaggaattccaccacttctgaggcacccaaaaccagtttaatttcaacgaagaatctgactgaaccaagaatattttcatctctcagtcatccaacctacaaacctgactcttgtcccttatttcaaccttgagccatacccaaaagcttcatgcacatttggagataccttcctttacaaaacacctgaaatctgcaatcccctgccagttcttggtgtcataatctttacccatggctgcatcgacttgttggctattgtgtctctaattcaataacacatggattcagagagactatgagtcaaatcatgtcccgtccaaacataactacacacagaaaagtcctgcatgacacagtatgtagggtggatattagttttggctcccttttctgacttcaaaaaatgaacccaccatgaaataacaattgttaacttcacagatcagcacaattttacaaagcactttcagcaccattatctcattcgggccccacaagaactccatgaagtcgacaaagcaggcattatccttattttaaagattatgaaattaggatccagaaaggtcaattaccttcccaacagctcccagctggtaagcggcagagtcccagtagcacaatggttccagcccatcacacagcctcagaaaaactctaattaatgtagtcttagcacaaagtacaggatctattcgagcattataatcagcaatcattgggataaatatctcttaaaattaacccttctgaatgtgatgccaagttattagaaagctctagcaccttgagacagtgtttcacattgtagcgcttaaacttctctcctctctttctacaagttcactaggctcttcgtcccttctctgctgcatattttaaagttacaaatatcctattatgttaaaatggttgggaagtatgactttattattcaattatgatgtgacattatcccaatagtaatgtaactactttttaggatccactttgcacttacacaactcccctcccccaccctgtcagatcctgtctttatttaaaattttaatattttgctcatcatggatgtttgtattttttatttaaaaaatatattactgagccagttgcagtggctcacacctgtaatcttagcactttgtgaggctgaggcagaaggatcacttagcagaataaaactgaaaatcaactccaaaaggaagtgtcaacattctacaaatacatggaaattgaatataatctgctcttgaatgatctttgggttaacaatgaaattaggatggaaatagaaaaattctttgaaataaatgattacagtgatacaacttatcaaaacctctggggagatgatcattatggcagacgagaggcaagactagattgcagctccaattcagatggacagagcagtgtgcacaggcttgcatcatgaattttggctccagaacgactgcaagaacaaaccaggaaccccaagagggcccacagaccctctgaaggaagtggactgctcctgcaggacccgggagacactccaaatactgtgattgctcaaactgcagaagtgggaaagggagatcctccactcctgagcacacatccccacgggcgaaactgaaggtttagtttgcaggacaagtttccaaccttacctggagctgagtcaatttagagagccaagcaaaatacaggggtagaggaagcagcaagaaaggccttgggagctcgctgggtccccaagcaggccattcctgcctggcaccacagagatcctttgggaagacggccagaggcacagaagaaaatgccacagggagaaggaagtcttcagctgaactttgtaacaatttgaaccagacaagaagcctcctggccagaacttgggggagggcgtgaatccagcattgcagactttacagagaggggaagaaccatgcccttttctttcacagctgggaggcaggtagcctggggcaagttctcaagccccgctcacccactgcctggaaacagactcaggcctgttagtgggggcacagtgggagtgagaccactcctgcggtttgcatgggagctgggtgaggcctgtgactgccggctttccccgacttccctgacaacctgcatgactcagcagtagcagccataatccttataggtacacaactccattgacctgggaacctcacccccatcccctacagcagctgcagcaagaccctcccaagtagagtctgagctcagacacgcctagccctgcccccacctgatgggccttctacccaccctggtagctgaagacaaagggtatgtactctggggagttctagggccccacctaccactgtttcctctccacactaccacagctgatgctctctagaaagcaccacctctcagcaggtggccaaccagcacaaaaacagagcattaaaccaccaaagctaagaaccctcattgagcccatttcgcccccctgccacctccactggaacaggtgctggtatacacgactgagacccacagatggttcacattacaggactctgtgcagacaacccccagtaccaacccgaagccaggtaaacatgatgggtggctagacccagaagagagatgataatcactgtagctcggttcacaggaagccacatccacaggaaaatggggaaagtactacatcaagggaacacccaatgggacaaaataatctgaacaacagccttcagccctagaccttccctctgacagagcctacccaaatgagaaggaaccagaaaactaactctggtaatatgacaaaacaaggctctttaacacacccaaaacaccagcaatggatccaaaccaagaagatatccctgatttacttgaaaaagaattcaggttagttattaagctaatcagataggcaccagagaaaggagaagcccagtgcaaggaaatccaaaaagtgatacaagaagtgaagacagaaatattcaaggaaatagataacataaagaaaaaacaatcaaaacttcaggaaacattggacacacttacagaaatgcaaaatgctctggaaagcctcagcaatagaattgaacaagtagaagaaagaaatgcagcgcttgaagccaaggtctttgaattaacccaatccaaacaaagacaaagaaaaaagaataagaaaatatgaacaaagcctccaagaagtctgggattatgttaaacaaccaaaccaaaaataatcaatgttcctgaggaagaagagaaatctaaaagtttggaaaacatatttgggggaataattgaggaaaactttcctggccttgctagagacctagacatccaaatacaagaagcacaaagaacacctgggaaatttgtcacaaaaagatcatcgccaaggcacattgttatcaagttatctaaagttaagattaaggaaagaatcttaagagctgtgagacaaaagaaccaggtaacttataaaggaaaacctatcagattaacagcagatttctcagcagaagccctacaatctagaagggattggggtcctatcttcagcctcctcaaacaaaacaattatcagtcaagaattttgtatccagcaaaactaagcatcatatatgaaggaaagatacagtctttttcagacaaacaaatactgggagaatttgacactatcaagccaccactacaagaactgcaaaaaggagctctaaatcttgaagcaaatcctggaaacacatcaaaacagaacctctttaaaacataaatcacataggacctacaaaacaaaactacaatttaaataacaaaaacaaaaatcaaggtacacaggcaacaaatagcatgatgaatgcaatggtgcctcacatctcaatatcagcactgaaagtaaatgacctaaatgttccactttaaagatacagaactgcagaatggaaaagaactcaccaaccaactatctgctgccttcaggagactcacctaacacataaggactcacataaacttaaagtaaaggggtggaaaaaggcatttcatgcaaatggacaccaaaagcgagcaggggtaggtattcttatttcagacaaaacaaactttaaagcaacagcagttaaaacagacaaagaggggcactatataatgtcaaaaggcctggtccaacaggaaaatatcacaaccctaaacatatgtggacctaacactggagctcccgaatttatttaaaaaattactaatagacctaagaaatgagacagacagcaacacaataatagtaggagacttcaattactccactgagagcaacagacaggtcatcaagatagaaagtcaacgaagaaacaatgaatttaaactataccttggaacaaataaacttaacagatatatacagaacatttcatccaacaacaaaatacacattctattcaacagcacatggaactttctccaaaatagaccatatgataggccacaaaatgagccttaataaatttaagaaaactgaaattacatcaagcactctctgagaccacagtggaataaaactggaaatcaactccaaaatgaacgttcaaaactacgcaaatacatggaaattacataatctgctcctgaatgatcattgggtcaaaaatgaaatcaagatggaaaaataaaaattctttgaactgaatgacaataatgacacaacctatcaaaacctctgagatacagcaaaggcaatgctaagaggaaagttcatagccctaaacgtctacatcaaaaaaactgaaagagcacaaactgacattctaaggtcacaagtcaaggaactagagaaacaagaacaaaccaaacccaaacccagcagaagaaaggaaataattaagatcagagcagaattaaatgaaattgaaaccaaaaaagataaataaaacaaaaatgctggttatttgaaaagataaataaaattgataggccattaggaagattaaccaagaaaagaagagagaaaatccaaataacctcattaagaaatgaaacaggagatattacaactaacaccatggaaatacaaaagatctttcaaggctactatgaacacctttacggacataaactagcaaacctaaaagagatggacaaattcctggaaaaatacaaccctcctagcctaaatcaggaagaattagataccccaaacagactaataacaagcagtgagattgaaatggtaatttaaaaattaccaacaaagaaagcccagggccagatgtattcacagtagaattctaccagacattcaaagaagaattggtaccaatccttttgacactattccacaaggtagagaaagaaggaatcctcctaaattcattctatgaagctagcatcaccctcatatcaaaaccaggaaaggacataatcaaaaaagaaacctagagaccaatatccctgatgtatattgtattagtctgttttcacactgctgataaagacatacctgagactgggaagaaaaagaggtttaattggacttacagttccacatggctggagagccctcagaatcatggtaggaggcaaaaggcagttcttaccatggcagcagcaagagaaaatgaggaagaagcaaaagcggaaacccctgataaacccatcagatctcttgagacttattcactatcacaagaatagcacaggaaagaccagcccccatgattcaattacctccccctgggtccctcccacaacatgagagaattctgggagatataattcaagttgagatttgggtggggacacagccaaaccatatcaaacgtagatgctaaaacccttaccaaaatactagctaaccgaatccaacaacctatcgaaaagataatccacaatgatcaagtgagttttataccagggatgcggggatggtttaacatatgcaagtcaataaatgtgatacaccacatgaacaaaattaaaaacaaaaaccatgtgatcatctcaatagatgcagaaaaagcattcgacaaaagccagcatccctttatgataaaactctcagcaaaatcagcatacaagggacatacctcaatgcaataaaagccatctatgctaaacccacagtcaacatagtactggatggggaaaagttgaaagcattccctccgagaactagaacaagagaaggatgcccactctcaccactcctcttcaacatagtactggaaatcctagccagagcaatcaggcaagagcatggaaaagcatcccatgctttttaatagtgaagtgttgatcctggattcgacttttgccatccagtaccatatcaacatcatcactctccatattgagttttacgatgtgtaaagcaacactctctctgcatctgcctatcagctgctattttgggtgaatgtttggtcttagattcttcacctcaagggtctcacatcttcaaatggtccattatcgatggtgctgatgatccctgtaagtcctctagaccagaggtcagcaaactttgtaaaaagcgggacagtaaatgttttaagttttgtggcgtcagagagtctctgtttcactactcacttctgctcattgtaatacaaaagcagccatataaaaggcataaataaactggcatggctgtgctccaataaaactttatttccaaaagtagatggtgcactggatatggcccatgggccctaatatattgacccctactctgtacagcagccttgttctatttgttgggttttttcaatagaaattgaaaggatgaaatgatgtcttcatacttgcaagatgactgatcattatcaacttaatggaaagggtacacttggagagtagagaaagacatagatgacctgcaaagccagaaccagaggtcccctcccagagccactctacacggaaactcccataatgccattaacaggtcctaaatgcctggcagagaggagatgatcaataaagactggtaccattattattatcaggactagattaatacagcatatgttactgaagttgttgaactatcaactaaagacaaaaatgttttttaatcaatctcatctcatagtttatggaacaggaattgccagcttccttttcatgggaagaaactgaggccttggtggttaaaaacagaaccagaaattccaagtaaaaggcagagatggtaaaaccagatttgaaacccttgccaagcacagacacatgtaggcaccactcatggccgttttcttgagcaaaatggcccacaaactattatacttgcagatttagtccattttgcccaataagaattaattctattgcagcaacttgaggctccaattatccctaaactttgaaactctgccagttcactaagaaactttttgttgttgttgttgttttgtttgtttgtttgtttggtttggtttttgagatgaaatttcggtcttgttgcccaggctggagtgcaatggcgcaatctcagctcaccgcaacctccgccttctaggttcaagtgattcccctgcctcagcctcccaagtagctgggattacaggcatgtgccaccacgcccggctaattttatatttttagtagagacagggtttctccatgttggtcaggctggtctttaactcccaacctcaggtgatccacccgcctcagcctcccaaagtgctgggattataggcatgagccaccatgcccggcccactgagaggttttatacatggaggcagccagatgttggtggaaagggcatgccatgagttggagagcctcagaggtttgggttcaagtccttgctttggtttctctgtgttttagttcactcacctaatgaaatatggatcataatacctactgagtgagtgttatggtgaattctgtctcctcaaaaaatgcgttggagttcaaacttgtagtacctattaacgtgacgttatttgaagacggaatctttacagaattaatcgagtaaagacaaggtcattgaggtgagctctaatccaatatgactggtgtccttataaaaataaggggaaaatttgggccccaaaacaaatatgcatacagaaaacacaaagtgaagatggaggcagagattggaattctgctgccacaaaccaaggactgtctggaactaccagaaaagctggaagaggcaaggaaagatttttcccctacaggcttcagagagaacagacaggaccctcccaacactttgcctttttacttcctctggattttttactagcctccagaactgtcaaacaatacactctgttgttctaagccatttagtttgtggtactttgttaccatagccctagccaagtaaccttgtgaagactcaatgagataatggaaacaagtgcatcactccatggccaagccatgatgtatgctccagaatgtttgtggaagacataagcgttcttttaaatgtctagtttccatttagcaaacccctagtatgtggctgttagtcagttttgcattactataaaggaatgcccgaggctgggtaatttataaagcatagatattttattttggctcatggttctgcaaacggtacaggaagcatggtgctggcattagcttctaatggggcctcaggaagcttccaatcatagtggaaggcaaagggggagcaggtgtgtcacatggtgagtgagccagcaagagggggaagggggaggtcccgcactcctttaagccatcagttctcacatgaactaatggagcgagactcactgattaccacgaggacaccactaagttattcatgagagatccgcatgccccaaacccctcccaccaggccccacatctaacattagggatcacatgagatttagaggggacagacatgcaaactatatcagtggcatattaggataccttgtgtatgttctcgtcagtaattcttacaataatgctatgaaatatgggggttatcagtctcacccacattataaatgacgagactggagcccaaggaggttaagtgacttgtgcaaggtgacacagctgggaagtggtcactgcgtggcactgattcatttagggtaagtcaccaaggtatcctgaatgcagcaatgacattagaggaatcaagtggtcagagttgttcaaaagcatgttccacatgaatatgtaacataagggatccataacattggaaagcctattctaagcaatttcagtggcatacttcatactatagacctttagaagtattatgtaatttaattccacaaaaggatatgaaatccagaggatatagtggacatagagatgtgctgcctatccagatcctccttcaaagaagggcttgcaatcaaaaccacaatgagataccatctcacatcagtcaggatggccatcattaaaaagtgaaaaataacagatgcagggaggttgtggagaaaaaagaacacatatacactgtttgtgggagtataaattagttcaaccattgtggaaagcagtatggcgattccttgaagagctaaaaacagaactaccatttgactcagcaatcctattactgggaatatacccaaaggaatataaatcattctaccataaacacacatgcatgtgaatgttcactgtggcaccattcacagcagcaaagacatggaatcaacctaaatgcccatcaatgacagattggataaagaacatatggtacatatacaccatggaatactgtgcaggcataacaaaagaactaaatcatgtcttttgtaggaacatggatggagctggaggccattatccttagcaaactaaacaggaacagaaaacccaataccccatggtctcacttataagtgggagctaaatgaagagaacacatggacacaaagaagggaacaacagacactggagtctacttgaaggtggagggtgggaggagggagagaagcagaaaagataactactgggtactaggtttaatacctgggtgatgaaataacctgtacaataaaccccgatgacatgagtttacctatataaccttcacatggaccctgcacctaaaataaaagttaaaaaaaaaaaagaagagcttgctgcccaagctgtcaactcctttagtgttgcctgagctatagaaagacctcgcccaatgtcatggtcttctggtgcagtctacaccgagtgactgaacaagaggaccagctacttcagaatttcagtgctgaagggtcatgctcgctgtagagctccccacttctaggctggcagaggtgttgtcaggcctgtattatgggtgggcatctccctccttagcctactctccctgccctactttcttcattagacattgtttcctactgatatgctgcacaccaaactccatctctatgtctgcttcagagaacccaggttttgcatcttccttcagctggcaagaaacaatattggcccagatacgaagctgataaaatatccagggagagaaaagatcctaaaatctaggcccttgtaacttgagaccagaaggacaaaatgcagtgaggtgtgaaggaagggcttaagtgcctgtaaaaaaagctccagcccagtctctggacagatgtgaggtcccattgacttaaaatccaaagaaagaatctccgtgaaataacactaaaatgcaagagttcatcttccctgcagcgttcagaaatagtccctctattatctgtagaatcaaatctgtaagaccagataactgtattttaaaggaatccatgataagaacattggaacttgatatttcaaattcaatggatcaattccaaaaaacgtacatgtatggctatgaaaagcctactaaaataaatggcatttcagattctcaaagtcattgaaaaaaagattttgaaagtcttgtgatatgggcaaaaacccctggctgacaagcaattgtttcctatgtatacatattcacatgtccacttaaggtcaagatcaaaagaagctaagtaagaacagaggagaggaaggactaaattgttccttgagaatttttgagctgattaaaaatttacagagaaaagaattcattccaaacattcacttcggaactcccgtttgaagggagcctggtactttattgctaaaccctgcctttcaagtgatctgattaccccttatcagggaccattagtgtctcaacccatccgctgttcgaccttaatttccttaaagaaaaaccttctttggcatgcaactcctcccctggttcaccccatggagtatccaaggaataaagacacactgaaacatccggcaccaaaaagtcaagtcacctcctgccaactctaacacaccattccacactcccgccacagaacaataccatcttcctgccccaagctttgctgagcaacagaaagacaaaatggcatccaatgttgaatacgatgattacgaaatatgtagcaggccagagtcaatgagactgtgagagctttcagccctgccttttccatttatgggtcaggaaccagaaacccacagtcacatggggcagtagaggtcaagtctagatttccgaattcaaaccaggcttaattccactacaaagcgtcaccacccacatcatatttttctcccacagcatgacttaaggagaaaacaaacccttcaggctgatttgatctaggaatgtcatctctcctttgttattatatgcatgtggtattatagacattttaaagataattcgggaaaactgagatccaccaccaaagaataatggctagggaagaagaacccattttgaattaaaatcccgtgcatattggtctcattttaaaatgtggtctctccctagtttccactaaggggaaaaaaagatacagaaaagaagatatagaaaaagggggaaccctataagaacagtgaaactatgactggcaggcaaacttttaccagaatgtggaaggagatgccactaattacaaagataaatccaacagcgcccctctggagctctgattttcgtccatcaccatgctcagaatcgcaggtctgtatgcacagaaaaacagctcagccattcccatagggtgtgggtgtgggtttgtcgatagttaagagtcccttccgagccggactttctacttttatctcaaagaggaaactaactaaatgacatagtgactgggagagaggggtgaccaaggagggcgttgcagggttggtgggcggctccaagctcttgagtgagcaaagagcctcaggaggtggagaggtgatgcaggggcagggggcaggctttgtcatgcgtgccaccagttcagggtcaggaaagcaaatggcaaagggagaatcaggggtcacatgtaaattaagtggttgaaatttaaagggttgctggtgagaccaggaagaatggcaagaaaacatttgtcatcgtaaagtatatctctgctttatggctggttaaggaaaaaggaaacagatttgattatacagaagacaaacctgaaatttgtaggaaaagttaggtgctcgggatgaatgggaggagatatggaggtaaaaatgaagaccaagaaaataacagataacccagaatgacttaaatactgtgaattcttgaggaggaaacaagagaggctgaaaagagagctttgatttaaaagcattcatgaggtcaggcaccgtggctcacacctgtaatcccagcaccctgggaggccaaggcgggcagatcacctgaggtcaggagttcaagacaggcctggccaacatggtgaaagcccatctctactaaaaatacaaaaattagccaggcatggtggtgcatgcctgtaatcccagctactcgaggggctgagggaggagaatcacttgaacctgggaggcagaggtttccctgagcccagattgcaccactgcactccagcctgggggacagaacgagactccatctcaaaaactaaaaaaattaaattaaatcattcatgaaaactttaaagagttaaaaaaataaccaatatgcagaggaaaatttgtatttaccatgttccaacctaaactgatgagagaagcccccagtgaaaggtgttctaacaactcttaagtcatatgaatggattcaaaaggcatataagtattcaaccagaggaaaaaagaagccatctacaacagaacaaaaaggaaacaccttcagttgttccttctataacactaaaaactaagggaaaatgcaatacaattttggctaaatttaaatttaagattattaagagatggccgagtgtggtagctcacgcctgtaatcccagcactttgggaggccgaagtgggtggatcacgaggtcaggagttggagtccagcctgaccaacatggtgaaaccccatctctactaaaaatacaaaaattagccgggcatggtggcacgtgcctgtaatcccagctactcaggaggctgaggtgagagaatcacttgaatctgggagacagaggttgcagtgagccgagatcgtgccattgcactccagcctgggcgacagcacgagattccatctcgaagaaaaaaaaaagagagagagatacaccaaatggtcaaaagatgactcaaaaacaataggccttcgtgatataaaaggactggtgacgaacattaaaatttattaaacaaggtctaaataaatgttataaaaatgctgaccatattaaatataaatgtaaaacacttcccaaaacaatgtattaaaaaaattatttaatagcaataatctgaatcctgaaacctagtttatatttttaaaatcttagaaataattgtatgactatgtcaaaacagctcacgtactccataaatatacacacctatatatccacaaaaattaaaaataaaacattacgtaaaaaaaatcttagaaataggaaaatagagttaaaacacattaagccgcttgcttgatatagaaaacttttaaaaattatctcattcttcattttgattattataggaatacatattttaaaagtttttataaatttaaagagccattagtaaagttaaaactaaagtacattgactcaatctcaggagagtgtaaaggttaaaaataagtaagtacacattttttaaaaactaaaacattagaaagaggaataaaacattttttaaaagtagaaactttctcgcaaaaataaataaaaacattaaaagatgatcagattgaattttttaaatcaaatatattttgtcctcaagagatattttgaaaataaaatgaccaggaaaactttttttaaatgaacaaagatttgttaaacaaatttttaagtggatttaaaaataggaaagtgtagcaatatttatttctgacaaagtggaatttcaggtagaatactgaacagtatagggactgaaaatttatatcaataaagatagaatttaaaatgcatacataataataaacctttcctgaatagcatatcaaatatatgaagcaaaaattatttcagataaataatatttaaaggagagaaaccattatatagaaaataatacacatgcctaaataacctttgatttaaaaattaaaacaagccaataaacaaagtatttttaaatgtgtaaaattttaaaatatataatcaaaactctagagataggtaagtttacattttaattctcttagtattaaaaaggaaacaaaaaaaatgaactaagcccacaatccaaaaaggaaacaaatctaaagaaggcagaaaatattttacaaaaccattgtcattcaacaaattatataattaattgataagtcctggagctgattctttggaaaacatgtacataaagacacacacatttctagcacttaagaaaataaaatcagaaaataaaaatatacctatgtaaatgaagtagaaatgatcacaaataaaaagattataagttataaaacatatttttatagatctatgctaataatatattcacaaaatgacagattcctccaagaaaatgttcattatcaaaacaacagcaaaagcatctcatgtggacaagccaaaaactatggaaaatttttcaaaagttacccaaaattcatctccaagaggctacataccataacatgtttttaggtaagctcttttaaaaaagtaatagattatttttatgttatataaatcacctcagagcacagaaaatatagaaagcctaccagcacagtttacataatttgcccaattctgaaaccaaaaccagagaagagaggaaagaggaaatccaaaagaaaaaaaaaaagaggaaaaaaatcctattatagaccaatctcacaacaatagacacaaaaattctatataaaataccacaaggtgaatttcatattattttagaagaatggcccaccataatcagattcgcacaaggaatgctgggctctttaatattaggcattgtattaatataatatgacacatttgggccaattagggaaacagcatgacactcttcagctagataaaaagagttgctagagtcagctgttcacatactaaatagatatcagagaaaaaataagtttccagatatccagataattctttaagaagaaaaggatcaaagtgtaaattatccagatgtctgagattaaaacattcattagttcaaacagaatgtcctctgagaaagagaaatagaactccagaagccatttccttcttattacaagcaataggaatgccccattcctaaagaaggccgtccagaacgccaaccttactgcaatttggtgcaggccattggccctctgttaggccatggattctctcttgctctgctcagtgtctagcctcagctcaagtcccacttcatcccctccaggaagctcctgctaacaccctcttctcttccttccctcctgacctctgggacaaaactctctgggaacactccgtcctgttcactatttccttgtctgtctctcctgagaccacaaactcctgcaggccctggtttgtgtcatataatttcattatccaaccctgcaacacagagtaagtactcaattaatattctttgtttaattaatcaatataccaaaaattttcaagtacatatctgtattaatttctgtgcagcaaaacaattctaaattaataatggagtcatgttttcctccaacaaatcagtccgaaaccctaatgcaggcatgcacataggtacactctgagcaagttttaagtcatttcctgattccagccctggcacttgagcttttagagcttgccacatgaatctagggaacaaaagctaaaaagcattccgctgtcatttttcttcctggttctgtttcatctgtgtagacagtgagaaaacacaactaggccaatccaggtttcccatttcaattacctgctggtaaagggtaatcttcaaatgaaactttaaaccaaagaatttaccttactcagctaatggcccaaatgtctccttcggcaaaacccaagagaatctccctctcttttaaaaggcaactttctgttttttcacattgcctgcaccaagttacactaatcaagaccacactaatgtggccacgttccaccccttaaccaattggccaagcttcatgggaataaaaattgctccaaaaactgagaatcctaagtactgcaggtactaactggggtggggaaagcctgttctgcttcattactcccacactggaattatattataacatagattaaaaaaaaccctggaatccaccaagaaattgactgacgttaatatttgaggaaatggcaaaggaaagttgttcaatttttgtgtgccttgttgcattctgggcttagggtttgctgctctactttcttattgggtcttgaaatggattttttttttttcaagagacaggatctagcactgtcgcccaggctggagagcagtggcacaatcacagctcactgcagtctcaaactcttgggctccaatgatcctgccacttcagcctcctgagtagctggaactctagggacaccccaccacacccggctaatttttttttattattattatctttatggagatggggtcttaatatgttgcccaggcttcaaggagttttgtttgtttgttttttgggtgttttgggttttcttgagacggagtttctctcttgttgcccaggctggagtgcaatagcatgatctcggttcactgcaacttccacctcccgggtttaagcgattctcctgcctcagcctcccaagtagctgggattacacgcatgcgctaccacacttagctaattttgcatttttagtagagatgcagtttcaccatgttggttaggctggtctcgaactcctgacctcaggtgatcctcctgtctcggcctctcaaagtgctgggattacaggtgtgagtcaccatgcccagcctcaagcagtttttttaaagaatcaggacagtcgtaaacgttcagttaaacagaaggtggaaggtacagcctaggagggtgctagtggattgtctgaagaaagcaaacagcagacagacaagattagcattgacagcaagaccacatccgcatcacacaaaaggaagaggaggctggcaggaatccaggaaaccttagcgatgaagtcagcaaatccaaattattccgtacaaatccccattttccaaaagatgggccaggtccataaatatatccacaagcccgtcggctaaacttgtggacgcctacctaaatatttcagatgtgggagcagagcgtctactgtgttaaaaagccatttttacccatctctttacatcacaaagcaattatttctcacctgccactttaatttgtactgacaacctaatgtcggacactaccaaagagaacaaatgaaaaatagaaagaatagttagtctcctatatgacatatgtttatgccaaaaagattagttaaaaatccatcttcctctacctgaatttacaggatgtttgagggaactgtcaggaaaatcattactaatgaagtaccagactatgtgaaacaatggttacaaaggaaatttaaaagacaagtgcaattgcagatgtcacagatttttcattagcaaaggaagatgctgggaaactttatgtttttggaagagtctgtgatcattacaagagcgctatatcttatccaatcctgtattcccatccaactctcagccttttctctctactcacactcctcctactatgtctgggtacttgacctctcctataaaaactggaaaggaaattactgtgatcctccatccctgccaaccaaacaccagacctcctttttggctagcactgcctatgatattaataaaccatccatccttgaactacccattcaaagtgacctacaaatatgcaaaccatcataactcacccagctccctgaggcatcccaatatcccacccaggagcccacaggaagatagctttgcccatgaaagggatggggcttagtctaaagatatacacccaactatgcctgtggccactaggttctcgcacggggagtacgagcagtgaaatcacaaagagaggatgggaaagacaaagagcaggagtggaggcccaagggtggtagtttgcaaagtgggctcaaatgattcatctgtccacacagataggccctccgtgccctttgtctagtaacttgatctttttaatgaaaaagcctggctatgcaaccaaggaataatgggaagacatcgcagcaagaagaaaagagcaagaattcaccatcctcagacttctcctagaacattttcatctcagtttctttttattgcccacgtcaacttgagaaaccagacttgcagtggcttggcccaccctagacttttcttcctcccaaagttcacgcattggccaacgttgtcattccccatttccttggtgctaataaaaagagcaattgtatctcacgcttgcattggcaaatgaatgagtgactgggaatgtggctccatgaccactatttctataaaatttgttctaaaaaaaattcaacaaaaatactaataaaaacctttatggtgaaggactataaatctatgaagtggctcagagtccaatttcccttttttacatacatcaaataccaagaatcagactcataacagttgtgagatggcttagtgagaccccaaagatgtaccaatcccacaggttgggattcacctctgaatccatacaaataatattcccattgtatcgagtgtgtttttagttagaaaaactctagttcttatatcagggataggtaattaggattattttgctttgagcaaaacccatgaagctgaaaaagtcaactcatttgtgcagaggagagggaactctgccaagtcctgagacataaacctggacctagacctcagcctgtgcaggagataggaggacagccaaggtttttgactctacactcctccaggaatccagcctgtgcagcgccaggggccctgagagcccatggagacagaaggatgcaacagtcagggtgacagcatcctcgcctagccaggggcatggcagggctccaacgtctgtgggaaattagtgtgcagactcggggctgacgaagaagtctcccctagggactgctcacccaaggtctcaggagagatgagggtgcgacgttttcagatggggtaggcagcacacctggggctcaccagacttacagtagaagagaatggaagtcactgcagatcccattcaccggtggaaatgggctgccctatacaccagttggaataggctgaagaactgagcaggactgaacctgcaggtagatgggctttctacccacaactgggccaggctgggatggacacaaccatggtgaaaaagatacccagaggcaagatgggcagcagcccaggtccatttcacatcagtgaggaagcactgcagcccttgtgcctagaaacagcacttttattacaggtgctgctgatgggctgagtcaagtgttaaacgatgcgtttgctgttgaatagaaatcacttctgaagcctgtactctgttcggttcccaagcatttactgagcatgagcaaggtgttggcatctgaagatgagcaagtggtaaatgtgaacacatcaatcctcgccacgtgttaagcgaccacagaacgtttcagaccccactcgtaaaccactgctttttttttttttttttttttttgagacggagtattgctcggtcacccaggctggagtgccgtggcgcaatcctggctcactgccacctctgcctcctgggttcaagtgattctcctgtctcagtctcctgagtagctgggattacaggcctgtgccaccaaacccgactaatttttatattcttagtagagacagcgttttgccatgttggccaggctggtctcaaactcctgacctcaggtgatccgcccacctcggcctcctaaggtgctgggattacaggcatgagccactacacccagtgctgcttctttactttgtattcaacaagggaatccttgcttaggagtcaagttttacattgacaacagcctttctgagttttgttatttgtttgtttgcttgcttttttttttttaaacgaagttttagctccacggctttttaaaaaatatgaaattcactttacatgttttttctaagtggattttataatgtatgtaatatggatagtgttaagactgtgtagcaggtttcaggatctaatgactgtttttaacttagaacttcggaagctatagaattaataagaactttttgttttttacttaacacttggtgccattttcacatcaccaatatatgatacacaaatgcagctgaggaagacacttcatactttctcattgtttctgtgaatagcatgaggcagtcatccattaagtggagtaatacatggaccctttttataagaaaccaatttcacacacttacctctcctcatctttagaccctacctgctcagtaagtttgagggtggagtagaggatgtgcctgtggtggttcatttcctatgtcagcctgaccggccatgggggtgctccaattaagcattattttggggtgtgtctgagagggtgtttcagacgagagcagcatttgaattggtggattcataaagtaaatggctctccccattgtgggtgggcaccatctcatctgttgagagcctgcacagaacaaaaggcaggggaaggaggaattgatcctttttgcttcctgcccacccacctgagctgctacagctcatctgatctcctgcccttagactgggagctacaacaccagcttccgtggttctcggggcttcgaacttctcctaaattacaccactgcctttcctgggtctccagcttgcagaaggcacagcatggacttctcctcttctgtaatggagtgagccaattcctgacaataggtctgtgtgtgtgtgtgtgtgtgtgtgtgtgtacacatgtatatgtaaagggtttgttttattggttctgtttctctggagaaccctaatagggtgctcctggagtaatttctattcaataccaaatgtatcagatcatcagcacgggcaacttgttttaaattataatatttcttaaacacaaatgatcaaaaactagaaataaactccttctgattagagcactgctgcaactataaaattaaaataatatttaaaataaacacaatcaaaacagtaaaaagccacacaatttcaagttgatatatctatgttaacatgcaggtagtgatgtgactatacctgtgactgccgaggcatctgtggtctgagtctggcctgtggcatgaccatgagtgccatgagctatgtgtttccccaacacttctctccactcacaccatggcgagtctttgcttagacagcacttaggtgataatctagatccttcacatgcagtgaaatctcactgtttatatcctaggtctaccttgattcctttttgcactggcatatgacaaaaacatgagtctctgctgctttgctacaccagggtctcttcaccacagcatgcccacggagtgcttatcaccatctgcttaatcagtttcacaatggagcatctcctcattgtctctaacttcagcccctcttcttttcagaggcaggtgctgagatgcctcccaaaatcagacttggaatgatagtcccagattgtgccaggttccaagaatccacgtagagtttaggttctaaaacaatcacccaaggcaaaaattaaagtctaaattatgcttgaaattttcctaaattgctaatcaagtataagatacatagctttatctacacagacctctatagtaattattttgctcgcttaagtttaagaaccactgaaacagactgctacagactgaatgtttgcgtcccctcaaaatgtatatgttgacaggctgggcacggtggctcacacttgtaattccaacactttggaaggtgaagactgaaggatcacttgaggccaggagttcagaccagcctggcaaatatagcaagacctcatctctacaaaaaatttaaaaattagccaggtatggtggcacatggctctagtaccagctactcaggaggctgaggcaggatcatctctggagcccaggagttcgaggcagcagtgagccatgatcattcccactgcactccagcctgagtggtagaatgagacccagtctctttatatatataaaaatatgtgtgtgtaatatatatgcagtttatcacatagatattttgcatatgcaacgcagttctgtaaattcagtgttgcattgagaatttattgtccttccatatatatatggaaatcctaacccttaatgtgatggtatttgaaggtggggggctttgaaaggtaatcaggtcacctcatgaatgggattagtgcccttataaaagagacctcagagagctccctcaccacatctaccatatgagaactcagtgaagacagtattctatgaaccaggaagtgggccctcaccagacatcaaatctgccagcaccttgattttggacttcccagcctccagaaccacgagaaataaatgtctattgtttataaaagccacccaagctatggtactttaccatagcagctcaaactgactaagccacaggcttaaaaaacgaacaaaagggaattttctccatagaagtctgggtatctaaaccatcccacatgttagacaactatagtccctgggttgaatgggacagcagtagagaattctaaagtgctcttgcttgccagaatttactcccttagtttctaatattgggcatctaaacttaacctgtgttagtagatgcagtcatgttgtgaaatctaaacaagaaaactgtggagtctcatcccaggacaagtatatgaagtaagctgttaagttaaaagtgcatgcaatgcaattctgtaaatacaacgttgcattgaaaaagtaattgtccttccttgtttagtcctataatcaattcatcaaacaatatttccctaaaatctttttgcaaataaggttaattttgttgaaatatccaattctgcatgtatttactgaagaaaaaaatgaatcttattaaaaatcaaggatagtatactgtgcccaaaatatcagattttcactgggctgagaatcaggagaaatacatgtggcacataaaggtgccacctgagaagaagcaaaaggaatgcttggttattaagacagagaggctgaaatatgatgacagatctcataccctaaatcaaaccaaacccacaatcagagtatctgggtctgcataattttcccaaaaacatttcaacttggtgcatttgggccctcttaaagcaatatagtctctgtaaatattccattaaaagaatcgaaatgattaagataatttaaaaattgtttaaatgtaaaaataacatttaaaattaaataaatacataaaaataatccacatgattgattgtgttcaattgttccctggttgtccccactcaactctggcctcctatcatcaagaggaactttttttttctatattaattgcctttgttccttctacagccacttggctctgatcatatcactcccaatccctctggttatcccactaagaaacctggaagtcattcttaatgctttctttccctctcccttacctccatatttaagcaatagcaagccctgatagttactctgggtaaaccccaaactatcccctcttcacctgtgctgccacatccagtccagacaatcagcatctcccacctgctctattgaagcattctcctaattttgcatccactctctcttcctgctgagctcttctctgctcagcagccagaatgaccttctgaaaaagcaaatctatcatgaaccttgacttgatccttttacttaatgcccatttctcctggaatcatggctgaatccctcccaacctgccaggcatgttccccatgacctggcccccgccaccgtctccagcctcagcaggggctgctctcccccactcactccatcaggtctctgtggccttgcaagggtttcatgcatcctcagcctgggatgaccctactcctccccatccatctggccaactccaccaccctcaatgtcctttcatcctaggaagcctgaaccccccacctctctagaccactccccttgttacaccttctcgggacaaggtaggcggaatgacccccaatgatgtccacgccctgatccttaaaacctatggatatgttactttacatgagataaaggagtgcagatgtgattcagctaagagtcttgagatggggagcatactctgggttatccaggtgggcccagtgtcatcaaaagagtccttaaaagcagagtaccttcctcacctgcaatcagaaggtgatgggaggacagaagacagaggacggatcagagaagtgacattactggctttgcagatggaggaaggggccatgagtcaaggaatgtgggtggctccagaaggggggaatgtcaaggacatggatatccccccagagcctctagaaggaacacagtcatggcaacagcttggtgttagcctggtgagatctatggcggatctgactcacagaaatgtaagaaaagaaatcggtgttgttttaagccactaagtttgtggtaatttgttatacagcaataggaaaccagcacatatggtgtttgtggtatttgtcatcactgtaatattggtaattactgaaatcatgtgatggttaaaaaaacacagaccctggagccagacagactgggtcaacctcccaccatcccactcactagccaggctccttgggacaagttaacctaagagactcactaagtttccatcccctcatctgtaagaaggtggtcatcgtgcttacccccagggttgtactgagaataacatgaaataatatgaggaaagtatttagcacaggggctggcacagagggggccttcagtacaggtgagccccaatgagtattatcattgttatttgtgggattatttgttttccccttggggttataagctccgtgaagacagataccatgactttattgctcatggctatatttccaggaacaagcacagagcttatcagagcaggtattcaaggaagaaatgaatgaatgggtctatctgtgaactactgacccagtgtgccccacgaaatatgctgggcagctgctacctatgcaggcattatgccaagtgctgaccaatagaaaaggggaggggagcgtctcttattttctaaaacctttcagcagcccagggtttccaacacatatatacagggtgacaacacaagacagcatggaccaaatggtacaagaatgtcaaagcagggggcactctagaggtaagaagatgaaatggtgacattatcttggatggtctaggaagctttcctggaggtgtgagatgtgagtgggtctctgactctacgtgaagtttctattggatgggaacaaagaagacaaaacattctgggggtcagtaagtggcattagcaaaggtacagagacaggcaggttaaaggtcctcgaaagtgtcattttgacttagattaagaattaatgccaaggactaggagacatgagcctgtaagagaaacgtttgggttggtttttaggtggtcctggatgccagctaaggatgatggattgccccctaaacagaaacgagggtcagtgaagatatctgatccagggcataacaaactgcaacaagtctacagggtaatggcagcactgggccaaagagctgtctgtgatggtgaatactgagcgtcaacttaattggattgaaggatgcaaagtattgttctgggtgtgcctgtgagggtgttgccaaagcagattaacatttgagtcactggactgggaaagtcagacccacccccaatctgggtaggcaccatctaatcagctgccagcacggccagaataaaaggcagaagaacatggaaagactagactggtttagtcttctggcctccgtctttctcccatgctggatgcttcctgccctcaaacactggactccaagttcttaagctttaagacttggactggcttcctttctcctcagcttgcagatggcctattgtgggacctcacccttgtgactgtgtgagtcaacacaccttaataaactctcctctctatatacatctatcctattagttctgtccctctagagaaccctgactaatatgctgtcctaacacatcatgtgctgattattcctcgttttaaaaaattggagaacaaaatgatcagatgctgatcttcattttgaaaacctcttttgaatgtgctgcctccctggtatgatctggatgcttgccagggtggtctggagacctcagtctgtttgctctcccgggaaaaatcatggtcacccactgacttcctcttttctcacaaatagaggacaaggtagttcttctgttgtaggtttcatcgggaatttattaatccccctcccggaggtgttagcatttcagtcttgtgcccagccatcttgcagtattgagagtggaatacagggtaagtcatatcctcaacagtccttgccaagaacaccaaaatcttagcctgtgggtaataatctaagtcttcttaatctaagtcaaaattaccctttccatctaaacataataccagcctctctaaaaaagggcaagctgacccggtgtggtggctcacgcctgtaatcccagcacttcggaaggccgaggtgggcagatcacctgaggccaggagttcaagaccagcctggccaatatggtgaaaccctgtctctactgaaaatacaaaaaattagacaggcatggtggcaggcgcctgtaatcccagctactcaggaggctgaggcaagagaattgcttgaacctggaggtggaggttgcagtaagccaagatcatgccactgcactccagcctgggaacaggagcgaaactccgtctcatagaagaaaaaaaaagcaagttttgtcccatcaggggctgacgcagacacagggaccaaagcccagccacctcctgggactctctgctgtcaaacaggaaggtacagatctttctccacccatgctctgtgatgccaaactctattataaaacatttactggagaagggtatcaaacgggaatttatttctatcacaaacagcactcaaatatttcccagatagtttctgcaatcagtcatgtgcaccttttcaaagttttaaatgtttccaaactttttggaaatgtatagtgattgatacaggcctttaagtttagtattactgctcatgccacattttcacctgatttccagtcttttgtggtattcttgattggtaagtcatttgattttatcttttattaagggcctttgaatttagcacaatgctgaaatgattcatcaatcataataaaagacttcaaagggatccaagctaaacttcaggattctgaggagcatactggacagtgaacttattgtatttcaacttcaggacaataagcctggtggaggattttgctctaaagacataatgagtatgttagtcacatctaaaaatcatctgctgtccgcatgttcagattcatatatatgtgtatatatataaatataatatacacacatatgtgtgtgtgcatttcatctgacattcatttattctgtagcaagatatgttttaggctattcttttctactgatccattccctgagcatcagaggtcactgtaaatgaaaaacaaggtgaactcccttgggtgggagccatgcttggccaaatccagagaaactgtgtggtgcttaattccagcttagtctacataggccctagtttgaaacataaagttgaaatccatcaagcaattgttttcaaatcaacatttcggaaacatttttcagtcatacttacatgaattcaaaatgttttcaaagtattgagtgttttgctgtattacatttgtaaaaaggcaaaagataatcagtgtgtgttgataatgttaatagagattttagaaatgatgatagtgaagtttaaaaaaggaacaccaaccaaacataaagaactctcttttcaaaatatcaatttaaaatacaggatctcccatggcttacaatggactcagtagtgaggcacacaaacagcagtaaaacacatctctaaggcatccagaagaaaatagataactaaatatccataatgctggccagactgtgatacatagcaaaatagaagtatttattctgtagcaagagatggaggctgcaaaggaaaatgcactctgttctcactaggggaatctggaggctctatacatggtagttttaattttttttttttttaaacaccaggctggagtgcagcggtgctatcatggctcactgcagcctcgacctccagggctcaaacgattctgtcatctcagcctcccaagtagctgagattacaggcgcccaccaccacacctggttagtttttgtattttagcagagttggggttttgccatgctgcccaggctggtctccaactcctgggctcaggtgacccatccatatttgattgtatcttttattgagggcctttgaattcagcacaatgctgaaatgactcatcaatcataaaaaaagactttaaagggaaccaaggtaaacttcaggattctgaagagcatatgggacagtttcttgtattagactccatctccagcctcccgaagtgttgggattacaggcatgagccaccatgcctggccggtagttccatttaaattagctcataaaaggtaggtaagatttcaacaaccagggaagaagacctcagtcaagaacaatatggccatagactaaaggcgtgagactggatggcacagctctgaggcagggtgtctggggactgagagcacctgttgctaaggtgataaattaagatcagattgtaaatagctccaaatgccatgctaaagtgaacatttctctgcaggacacgggtccggagaaggttttgaacaaagcactttagacagatgaatctgagggtaaccctaaagacaacatggaagctggagaaagaggaggaaagattctctaagagataaatgcactggcttacacaaaaagcaggtgggcttacacctggaaggtaatgatggaaacaaaaaagaataaccaaaattcagtagtatgtcaatatctggtaactgacaccatctggaatgaggggaaatgattcaagactttccaactgggacaggtggagagagaggggtgtaatctaggaagatggaaaatgcaagagcaaatcagattctgaaaacaattaagtaattcctgattcctttcaaataaaaggtgaggcctgatgtgagtcttaaagtcttaaagttcactggttaaagggaaaacagtgggggagggaagcacagtccagcaggatgcaaacaggtgagcaaagccacaggttagaacatggaagctgtcgaggaaggcaagaaaaggggaaggaggcataaagctgggccacgtgccaggaccagtgagagggtgaccatgaaaaatcagtaacaagatcggtgaccacttagacgtagaggatagaggtgtgggggcagggtggactgagaaagtctctcaggtttcaagcttaagtgactccagggcttttgtgcccacatttaaaacggagaatagatgtgaacaatcaaggaaaaatgactgatgctgagtttaaggcacctgggagacgggggataattgcttcccagagacagaggtgcagcgccaaacctggggaaaggaagacccagtttaaagataaaagggttgttaccctttagacagcaaataaaaacacgtgtgtagctggtatcactttgaaaagggaagaaggaaagcccacagatctctctacagacaagacaaccaacgactaaaaaccatttagattaaaagaaaagaaataatcttacagtaatgttgtaaagaggtattaacatcaaaagactaactagaactaacatcaacagcagaaaggacaatttatagccttattcattagcatgctgcttactgttccactgacaattttaaccaccgggttaagcaaaatctttgccttccttttttttgctttttgagacggagtctcactatgtcacccaggctggagggcagtggcacgatctcggctcacaaccacccgggttcgagcaattctcctgcctcagcctcccgagtagctgggattacaggtgtgcaccaccacacccagctaatttttgtatttttagtagagacgaggtttcaccatgttggccaggctgatctcgaactcctgacctcaggtgatccacctgccttggcttcgcaaagtgctgggattacaggtgtgagccaccatgcccacccaatctttgcctttcattaaagtcatgaatttcctgccatcaatggaaatgtcttttgatgaccacatggatatcaggagcgatgcatcctgctttctgtccccatgttccagtgcaatcaatgttttacacatcaaacattccagtggagaatggaactcgtagaacaaattagaaaatattcatctaatgatctatccaaagataaggaaggtcttgatactacaattctgttaaattctgttaaataaagtttaagagtgtaggtgtcctttattaacaaaatccttacctttggaaaatggtctcttttttttacagagctggtgaaacacaccaggctaacttcttgtcaccaggattcatccataaaacttttgtgggttcccactgagcagcccttggagccccctcttgagactctcataaatgtagaaagtgttctcattgttcaaatcccacttacaagtgagaacatgcagtgtttggttttctgttcttgtgttagtttgccaaggatgacatatataccatggaatactatgatagtccatagtccctgcaaagcacatgatctcattccttcttatggctgcacagtattccatgtgtatatgtaccacattttctttatccagtctatcactaatgggcatttgggttggttccatgtctttgctattacgaatagtgctgcaatgagagcatcaggacaaatagctaatgcatgtggggcttataacctaggtgacacgttgataggcacagcaaaccacgatggcacacatatacctatgtaacaaacctgcacgttctgcacatgtaccccagaacttaaagtaaaataagagaaggaaaatggtaaaaggaaaaaaaaaaaaaaaaagaggctgggcgtagtggctcatgcctgtaatcccagcactttggaaggccaaggcaggcagatcatgaggtgaggagttcaagaccagcctggccaatatggtgaaagcccgtctctactaaaaatacaaaaattagccaggcatggtggtgcatgcctgtaatcccagctgctcgggaggctgaggcagaagaatcacttgaacccaagaggcagaggttgcagtgagccaagaccgtgccattgcactccagcctgggcaacagagcgagactccacctctaaaaagaaaaaaagaaaaaaaagaaagtgaatgacactagcttacatgggtgctctctgaggagccaaaaccacatttagcagaagcctgagaaatgcagcacctcagtcaactccaagaagcaccgcagcccagcaagatctgccaggagctctccctcctgaagctccacgcaacaatgcacagctagaaacttttggtcttcagttatcaaatggagcaaccagtgtaaccaaagtcaaataacttcatgggcatgctaaccacccttcgtgaaagacacgcccaatggtccagaccagtcacactgatggggctcaaaggcaggcaagagtcccagcctggatgaacccttcacactgagcgagagcggtacactcacggcttcccaccccgagttttctacctcctctctctctctctctctgcctgctgccccccaactcctcaacccacccgggtccccggggaggctgtgtccttctttcatttcttgtgtcaggtttcgggctgacacgtggtaattgattccgtggctggttagacgggcgttaagtgggagggatgaagtttcactgaaaacaaatagcacttcatgggtctgacctttcctcttggaagcttttgttgtggtcgactctaggctgtgcagttcaaacctgtgtgagcaagttgtgtctatgtcggcagttccccaattcaccttcaccagctcccagtgtgcagtgacagctagattgtctcactgtcacttctggcatgatgacagcctagcgtcaggtggaggcaatgattcacacctgagaattagtgtcccagggactgagatggctgagtatggcctgagccttcagaatagcaggacttcatggaagagacttgcattcagagaaaaacaaacaatcccatcaaaaagtgggctagggacgtgaatagacaattctcaaaagaagatgtacaaatggccaacaagcatatgaaaaaatgctcaacatcactaatgatcagggaaatgcaaatcaaaaccacaatgcaataccaccttattcctgcaagaatggccataatcaaaaaatcaaaaaataatagatgttggcgaggatgcagtgaaaagggaacacttttacactgttggtgagaatgtaaactagtacaaccactatggaaaacagtgtagagattccttaaagaactaaaagtagatctactgtttgatccagcaatcccactactaggtatctacccagaggaaaataagtcattatacgaaaaggatacctgcacatgcatgtttatagcagcacaattgcaattgcaaaaatatggaaccacctaaatgcccatcagtcaatgagtggataaagaaaatgtaatgtgtatatacatatatatatatgtgtgtgtgtgtgtgtgtgtgtgtgtatatgtgggtatacatatatatgtgtgtgtgtatacatatatatgagatggaatgctactcagccataaaaaggaaaaaaataatgacatttgcagcaacctggatggaactggagactattatcctaagtgaagtaactcaggaatggaaaaccaaacatcatatgtcctcactgatgtgtgggagctaagctatggggatgcaaaggcataagaatgatacattaaactttgtgaacttgggggaaaggatgaggggtggcaagagataaaacagtacacattgggtacagtgtacactgctcaggtgatgggtgcagcagaatctcagaaatcactgctaaagaacttattcatgtaaccaaacaccacctgttccccaaaaacctattgaaataaaacataaaaaatatttttaaaaaaaggacttgcattcaataaataggatggataaatcttggataatacactttgtccaagtgcaacttccagtttatggcacaatttcagttccagtcacccaaaggaggcatcagcactaagctttacccacgtgaagttcaaggttcccccaatgaaacctttgggttacagtcatgcgtgttctctgcattccccacatcctccttcagaactaaaggatgcctttccccagggcttagagggatgtcagtggcagctttcagctatcctctgcagatgctgcctttggctgaagggagccaccttacccaggattacaccctcttcctgtgacagccagtgtccaatgagcaacagaccaggagcacaatggtctgagcctccagccccagctcagcgtgactctgaaggccacgccagcttcccataggatgacagtggcactatcaaattcttatctgtcacctcctgtttccttttctccttgatcacaggagtggccccaaacaaacttccagcagtccagtatcccccagggatctgcctcctggaaatccaggctaggattttggagccatatcgcccactccctagccagcaatgaggaccccatcacatagcccctcactcaaagtagcagtggacactttgggaggccaaggtgagaggatcactagaggccaggagttcaaaaccagcctgagcaacatagtgacatgccatctctaaaaaaaactttaaaattagccacatgtggtggcacatgtctgtagtcccaactacttgggaggctgaggcagggggatcgcttgagcccagtagttcaaggctgtagtaaactgtgattgtgccactgcactccagactgggtgagactttgtctctaaaataaataaaattaaataaaaaagtaacaatggaattgttaagactttcaccagagtgaactgggggagggttaccagggacaggaaatgcaggagcctgtgctgagctgagcatcagctgtttgagaaatacacacaggaaagaggagtgataaagtcaatgagattgcctggctgttgctgaggacaaatgacgtttgggggactgacaagaaaaggctgaggacactgaccatgaattaaaggctatgagtgaaagccaggggcctcctggccaggatgtgaagggactctgttactcatactcaagaggcagaaaaagctaaggatggggcttagaatttagttacaaaaacagcagagtgtcacagaattttaacccccaactagacaagtctgctatggccaaaatcagagctcccactgggaaggaatgatatcttgatataggggaccttgaatccctggaacccctgaactctctgaggctccagaacaggctcacccaggggagggctcgcacctccctcttgctggaagacactctgcagagacctctgcctataagatagcacatacccaggatctatcccctcttcctcttctacctctgcccacaagacattatacacccaagatcaacctcctcttcctcttctggcccccaggctaatgtcaagaggatagaccctgaaggatctgcaagtcccgcaaatgtgctggtgggagccaggagagggtggcgggactcggtcctcagggctctaggtcaagggggtagaacacaaagtcagataaggaagagtttattaacactggaacattctctcatgatataggatgtaatacctgcattcatctgctagggctgccgcaacaaagtaccacaaactatgggcttaaaacaacagatatttattgtctcatggtcctggaagctagatgtctgagataaaggttattagtcaaggttctccagagaaataaaaccaagagagatagacagacagatagatagataatatatagatagttgataaataataggttagatagatagatgatagataataaacagatgacagttaagtagagagataatagagataataaatagatgataaatagataacagatcatagataatagagatagattagatagataatatagacagaatagataataggtaagtagataaatagagatgatagatgatagataaatagataacagatgatagataatagagacatattagacagatagacaatagagagagagagagaataaatgaagacatttatttgggggaaagctcacatgattatggaggctgagaagtcccacaatctgctgtctgcaagctggagaccaggacagttgttggtgtaactcagtccaaatccaaaggtctgagaatcagggtatgtgctggtgtaagtccccaagttcaaaggattgagatccagtaggtttgatgtccaaggtcaggagaagatggatgtcccagctcaagaagagggagagaattctcccttcttctggccttttgttctactcaggccctcagtgccttcccagtgggatgctgcctggtcaccactgacggcagatctttcttactcagtctcctgattcaaatgctgatctcttccagaaacaccctcacaggcacacccagaaataacattaccagatatctggacatccctcagcccaggtcaactggcacatacaactaaccatcacagaaggcagcagggttggtgttttcttttttgtttgtttgtttttgagagggagtctcactctatcgtccaggtggagtgcactggcgcaatttcggctcactgcaacccctcctctgaggttcaagtgattctgcctcagcctcccaagtagctgggattacagtcatgtaccaccacgcccagctaatttttgtatttttagtagagatggggtttcagcctgttggccaggctggtctctgatctcgaactcctgacctcagatgatccgcccacctcagcctcccaaagtgctgggattacaggcgtgagccaccgcacccggacagggttggtgttttctgaggcctctctctctggcttagaggtggccatcttctccctgtgtcctcacatggtcatcccccattccccggtaactgtgtccaaattttttcttcttataaggacaccagtcattggattgcgaccctcttatatgacttcatttaaccttaagtacctctttaaagacctatctccaaatatagtgacactctgagctactgaaggttaggacttcaacatataaatggaggctaggggtgtagagaggatacaatatctcaacaaaaattatgagatggtatcagcatgatgctgggatagttcttggaagccaggagcaagcaatagccatattaagtgaagcaggaatgccagaattatcatggcagatgcgggggaaaagtcaaaacacccagagtggacagctatagtgggtacacctcttaaggccagaaaatgtaccagaggctgttctgtgggagggtccagcgggtatgtcacttaccaaagtacaaagaagtgtgccaataagaggtgccagcattactgaaaacctcagtggttgccattctctgtgggccaggaatgatggtaggagacatctaacaatggggatgacaggatctccaaatatcagaaaccaggcaactatgcacagctatcagaagccagacagacaataatcccgagggtcaaggtcagagtgctaccctctgcaagtcatctggcatagttaagaaaagattgttagagaatagcatcccttagaggccaggcagagctgcaacccaagtatcactcaatctacagcatcagaagaattcacgtttggtggtcaggaagctgaagacaactggcccaataataaaccagggctctcagcctagtttccagatctgaaggaatttcagacccagaatggttgacactgatacacagagacttgaagcaccctcatggcctccctattatatgcctttgcctcccaggtagtaagtaacaaccagaaccagttctggttcatagtagggcactggggcactgcctagtggagctgtgagaagagggtcaccatcctccagaccccagaatggtagatccaccaacagcttgcaccatgcgcctggaaaagcagcggacactcaacaccagcccatgaaagtagccggaagggaggctgtaccctgcaaagccacaggggcagagctgcccaagaccacaggaacccacctcttgcatcagtgtgacctggttgtgagacatggagtcaaaggaaatcattttggagctttaagatttgactgtcctgctggatttcagacttgcatggggcccagagccccttggttttggctaatttctcccatttggaatggctgtatttccccaatgcctgtacccccattgtatctagggagtaactaacttacttttgattttacaggctcataggcagaagggacttgccttatctcagaagagactttggacttggacttttgggttaatgcaggaatgagttaagactttgggggactgttgggaaggcatgattggttttaaaatgtgaggacatgagatttgggaggggccggggcagaatgacatggtttggttctgtgtccccacccaaatctcaccttgaattgcaataatccccatgtatcaagggcaagaccaggtggagataattgaatcatggaggtggttacccctatactgttctcatgatagtgagtgagttctcacgagatctgatggttttacaagcgtctggcatttcccctgctggcacttcttctcttgcttgccaccacataagacgtgcctttcaccttccaccatgattgtgaggcctccccagccacgtggaactgtgagtacattaaacttctttttctttataaattacccagactcaggtatgtctttatcagtagcatgaaaacagactaatagagggtgtttgcaattctccacctccacagatttcttggtgtgtgagataagagctatcagtgagaaaggacaagggagagtttctaaaactgtccaccccagccaaaacagtaaatcaaaaataacagcacattctggggtaggggttaggggaggtttggatcttaaagcttagaactatccttaaagaccttaagggtgcaggggtatgtcccctctcatatcaccatttaattaatttggtccctgcagaaaccagacaggtcctggaggatgacagactcctgtaaactcaaacaagtagcagcccacagctggctctgaagcttccttgccatatgttgtatcttcactaaagcacaggccccaggtacatgctgtgcagcctttgatctggggactgtgttcttttcatctctatcagaaaggaggatcagaaacagttcacagtcactcagaacacacaacagtattcacttagagcactgacccagggctatattaactctccctaccatgtcatcatattgtctgaggacacctgggccacttggacctctgcagaacatcatcgtggtgatgacacttgtaaaccagacccaatgaacaagaagtggcaagtgtgctgggacctttgtaagtcagactcataaaataaataaagaggcaggaaaagttctatgaagcttcaggggcctgccacattagtacacttttaaaagtccaggatctgcagcatgccaggataacttggccaaagtaaagaataaattctacattttactcccctaaaacaaagaatgtaacacaacactctttggattctggaaatattaattccacaattgggaatattgatcacacccacatggcaagggacccaaaaggctgccagttttgaataggaaccaaaacagcaaaaggtccaggctgcaaggcgactggccccacagcttggccaaaggacccagcagttgctaaggcattagaggtagtggtgacggaaaaagataccctgtcgtgtctggcaatccacattggcaaatcacaactcagacacttaagagttctagagcaacactgtgccaactatagcaagaacgatataactttggaaagaacagctcctagcatgctgttgggccctggaagacatggcatatctgaccacgggacaccaagtatcagccattcatgatgagccaggtcctgtcacacccacaaagccacacagctgggcaagtgcagcagtaattgatggaaagatggaaacggtatatcctcatcaagggcatagcaagctatgcaagcaggtagctcagaccccatattattcatcattattgcatcagtgcctctcttgagctcacacctatggccacatgggaggtcccttatgaccagcccatggaggaggaaaatacccaagattaaatcagtaagtcagagtatcattgacccataagtcagctgagtttgaggatacaagccaaaaatagccagtgaccgcagtactgcctcattcaggagctggccttgaatgacagtggagagaagaaatccaggggacagagctttggactatgcacactacatactgaaggggaattggaaattgctagtatgtaaatattattagcttcacacactttgattgaacttgggtagacaacaatatccccaaatctagctgagccttagaatcaactgagaagctgttgaagaatgtgcatacctaagccctaccccaaagtgactcaaatagatgctccaggtatagagctcagaaactgacatcttaaataagatccttaagtgattctgattttgctggtccttggactggtactaggaaacatttgtctaagcgattagcaatgccataacaaaaacaaaaacattaataataaacgcaaacacatataacattatgtgcttaatatatacttacctttaaattctcacaaccactccaggaggtatgtattattattaatcccattgcagatgagaaaattgaagttaagtgacttacccaaggttacagagtaagtgaatgacagagccagtgttttaaattagtcttactctagagtctttctgcttaaccataatgccatagtggaaaaggcagtcaataaaggagaagggagctgaaaaatctgtaatccaaaaagcacatacagtatatagggccaatttctgcatttacctaaaatgaagacaaagtgtttttccaaataatttaacttcaacagctgaatctgtttacaatagcatgtgagcaccacctagtggctctgtagggctgcttgaatagtaagtgctctctaagtacaatcagctcaacagaaaagttattaaaatttagtagatgcaagtttccaattccagaaagacaaattctatgacttcaaaaatgtttaaaaacatagtgagactatacaaattagggaaaagatcaaaacaggtgaagtcaaaaatagcaatagaactgattacatattaaggtttgttttttttagtgaaaatacaataaaacatgaaagacaaaaagccatatgcaaatcatttttaagtttaaattctgataatgaatttacttcaggtatacactaaaaacttttttttttttttttagatagggtctcgctctgttgcccaggctggagtctagtggcgcaatcttgattcactgcaacctctaaagtgattcttgtgcctcagcctcccgagtagctgggactgcagatgtgcaccaccatgcccagctaatttttttttttttttttttgtagagatggggtttcaccaagttgcccaggctggtctcaaactcccgggctaaagtaatccacctgccccagcctcccaaggtgctggtaaaaaccttttgactcatcaccttttctaggagtgatcctaattcagcatcttcttcctgcccaggcattaagacaccatctgctcctgcctctctcccaggagacctcaaagcaacctaacgagataaaaagggctggagatttacaggtccacttcctgtcttctcttcttctctgatgtctgtgaggttcattttctctcaagatctattgaatccaaatatacagagccaaggcagggcaacctcagtgacaggcagcatcagttctgagtacacaccatgggggccaatctgggaggtgagaagcaaaggctggaaagaaagtagcaaggtccaggagcaagagacgatgttgaggtcccaagaatctaattcagagccaacgccaggacacagcagagtgagaagacagagtgtggttccatgaacagagcctggcctccatagcctctggtgaggtgatctttccagggcctagaaagcatcagcatttcctgggttttttttgttttttttttttttgagacagggtctcactctgtctcccaggctggagtacagtggcgcagtctcagctcactacagcctctccctcctgagttcaagccattctactgcctcagcctctcaagtggctgggaccacagagacaccccaccatgtctggctaatttttgtatttttagtagagacagggttttgccatgttggccaggctggtcttgaactcctgatctcaggtgatccatctgcttctgcctcccaaagtgctgggattacaggcgtgagccactgcacccggccatcagcgtttcttaaaacgcctactcaaactgatatggtttggctgtgtccccacccaaatctcatcttgaattgtagctcccataatacccacgtgtggagggagggacttggtaggaagaaattgaatcatgggggcaggattttcctgctctgttcttgcagtagtgaaaaagtctcacgagatttgacagttttataaagggcagttcttatgagatctgatggttttataaagggcagttcccctgcacacgctctcttgcctgccaccatgtaagaagtccctttgcccttccttcgtcttccaccatgcttgtgaggcctccccagccctgtgaaactgagtctattaaacctctttctctttataaattacccagtctcgggtatttcttcatagcagtatgaagatgggctaatatatcagcattaagcagaagaaaagctcttccgcaggatttacatgtggatgaacctcgaaaacacgacgctaagtgaaagaagttggatacaaaaagctacacgttgtatggttccatttgtatgagctattcataaatccacaaagacagaaaacagactggtgcctgtagaagctgagggggaggagggaatggggagaaattgcttgatgggtctggggctttactttggagtgatggaaatgtttcaaactagacagaagtgttggccatacaacattgtgaatgcaaccaatgccactagtttgttcattttaagatggttaattgtatgttatttgaatttcaccttaataaatatgtgtgtgtgtgtgtgtgtgtgtgtgtgtgtgtgtgtgtgtgtgtgtgtgtgtgtacacttccttctgtggccaatgtcagaaatatcacaaatacaaaattccatcttttgtcttaggattttagaccaggatattttgaagtttgaatactgtgatggttgactttgagtgtcaacccctcttctgctgaaaaggaaacccacgtggtttggcatttgactagaataactgggctgccccagctgtgtctgtaaggtgtttccagaggagactggcatttgagtccacggactgagagggaagacccccttggtgtggtgggcaccatctgatcagctggggactctgacagaacgggaggcagaggaagggcaaatttgagctttcttccaaagccaggacatccttcttctcccacccatggacatcacaactgcaggttccccagccttaggactctaggactcgcaccagtgtcccccagtctcttaggccttcatcctggaattgagagttacaacattggcttccttgcttctgagaccaaggaacttgaactgagccatgtcactggcttgcctggttccccagcttgcagatggcctatcatgggactctgtaacctccatgatcaagtgagccaattcccctaataaatcccctcttatatctctctatggacagataggtagatagataattgatatatattagatagatagataatgataggataaataagataggcagataggcagacagatagaatagatagataaattgatagatggatggatatgtagacggatggatggatggatggctggatagatgcaccacagccagctgtgggctgctacttgtttgagttggcaggagtctatcatcctccaggatctgtctggtttctcccgggaccaaattaattaaatggtgatatgagaggggccatattcctgtatcctataggtctttaaggatcgttctaagcttcaagatccaaaagatagattgatggagagagagagagagagagagatgaatggatggataaagacagatcagatagatagatagatagatagatagatagatagatagatccatccatcttctagagaactctgactaaaaccaatacttgtgagaatcctgtataaaatgtagctagtgatcttggacaaccctctaaagtaagaaggtcatgagccttctctgcaaacaggttttgacagtgagaagggaaagaaaatagtgacacctggactcctgggaaggaaaagaaaattcgtttttagcaatgaggttgctaaaagaagcaactagaaaacaagctactccaacttcagatctttgcttggtaaagcctctactttcaggtgagtggggtgagttttctgatgagaatcaagaaggccggcctctctctctgggaagctcccagcttcatggtcctgtggcagaagaaacccaagtctggaagaatccagggcctcatctgagcctttctctccagcattagaaggaaatccacaattggctgacaagcccgcattccaaacacacacccagttaatgaaaaccacacacacacaaacgagagataggttctacctgcctgtgacaatctggagtaggaaaagcacatgaaaaatagccttgggactttattctgaatactctgcacctaaggaggaattgagtttctcaaaaataaaggctttctgtttacaaacatgctgtttttgccaaagagaattctttattttaggtgctttgggaaaactgcagagtcctcgggtttgtggccaaagacgcccaaatgttgcaatcctaaacctttggcagcgacaaaaacatgttggcaagtggaaagttttcagcatggggcttttcatgttgttttgtttgggtgtgtgtttgtttatttgcttggtgccaaagggtttcctccacatcttcccagaaccagagagcatgttggcgctccacttgggatgttggccccaaaccacctgcactcctattgtacatcctgtatggtttcaggcccccaaaaacagcctttgagctcagggagacacctctttcccacctccaaaccctaagtgaagcctcggacaatgagaggggatgacatgaagcatttggcctccatggctgtggacttcatgagggctgagggcatttctgaatttcagtctctgatcaacccacagttctgttgttccctctgtctcgccctagcaggcctcatttctatctctttccatctccccggctgctacctgtgctgcggtagccacttgatacatgaactatggcttcccgcccgttaaaactagacattcaaagaccagcccagcagaatgtgggcacaaagagcatggaattcccagatagatctttacattgtaacagagcagggatgatcatcttgaaaatcaaggcttttgattaacaagacttgggtattttgtaactcaggaggctaagccttgccctgggatctaaagttctagccctgagagaatagaggagggtccaagtgccccgcccagaccctgaacaggccaaaaagggaggaaatgctggggagaggacctaagctggatgcaggaccaagagggtcagcatggagagagccagtcagcgctcaaccctgtctgtcaccacctgcagatggggagctgagagggaacagaacttgcacccccattcagtcctgtggatggtccaggtagccaagatggccccttgagctcagagctgttggagtctcgcctgctaacagtgctgcatgaggcccatccaccactatgtgtgtgtgtcccatcagcacctcacactcaggaaacccacaactgagggccactgcctctctccccttctcccccacctccccctactccaacccaggcccccttcctaactggcttttcatgagagctgcaccttttgagtcatcgaagattctttgcatcggctttgcagtctctgtcccctctgaggctcactgatggtcagatgctgagcctggcaccttttccatccaccaatggtgccactgcctggctcaagtatctaattttatgtctgtaaatgaaaacaatttaacattcccctaattgatacctcaccctcagtctccccacacgaaacctcataacctcctctccttgtttctactctggctcctgtttctgtctgctcgccttttccctctctagttttcctccttctttcccattttcatatgtgtcgccagccccatgtagtgccagacaggctacattttttcagtgtctcaaatgcaagggtgatagtctcactccttcaagccttcacagatgttgttctctctgcctagaacacgttaacccctttctcccttttctccttctcatctttcagatgtcctgggtgccactccctccaggaaggccatcatgctttcaccaatgggtagcagaagcactgattcccatgggctgaaactataaggaaacatattcatgtcatttaacaggagcccagaggcagtgtgggcatcagtggtgctgcaccatcgtcaaggaccctgtctctttccctcgtttgtcatccccagtgctggcttcatcttcaagctgtagtaagatgtctgccccagttctagacaccacattcagacactatgctatctggagggtgaagggagtttctctttctgtacctgccgtcaggcatgagaagacatttccaagtcaacgcctctttcctccccctaaccagaactacctttacatttcattggccaaaatttagttcacatgtgtgtcactccgccaaccactggtgaggggagtggcaataatcttttgaataattcgctgttgggccacctctcaggctaagtgagctcagctttccccaaggcgctggctgtgctgaaagcgtggggacttgatcaaaacccagattctggctcacacctggaatcccagtgctttgggagggtgaggtgagaggatcgcttgaggccaggagtttgagagcagcctgggcaacatagcaagactctacctctacaaaaaaaaaatgctttttaaataacgcagattatatttggaaagaagtggaaggcaacaggccatcccgcagcatttgctctcctttgcatttggctctaagttcctttcggagtctcctcttcctcctgcatactctaacctgaaggtgagagtgcaccgcccccacccctgccccctgcctggccccttctccccatcacctcttcacactgaaactccatctcttaaagcccaaccttgaaggccaattccaaaatgagccttttctgatccttccacccacacatactcatcctgagtatgtagaatgatgctctccaatgaaaccaccaagcaccctttcccactgttttctgaatatcgggctcctttggaagttccttaacagccaagctgatgtgactgacagctgcacttccatttgcacatggcccccaattcgcacatgttgggcgttgtgatggctaatattgagtgtcaacttaatgggattgaaacatgcaaagtattgttcctgggggtgtctgtgaaggtgtttgccaaaggagattaacatttgaatcagtggactgggaaagacagacccaccctcaatgtgagtgggtgtgatctaatcagctgccagcgcggccagaataaaagcaggcagaagaacatggaaagactagactggctaagtcttctggcctctatctttctcctgtgctggatgcttcctgccatcaaacatcagactccaagttcttcagctctgggaactggactggcttcctttctccttggcttgctgatggcctattgtgggacctcacctggtgatcatgagagtcaatactctttaataaactcccctttatatctatcctattaattctgtccctccctccaaagaaccctgactactacaggtgtgctataaatggttgtgagtgggtgggcagagcactgagctcagagtccacagccaagcatttagcctgcgctcagctgtgcacctactgtgtgtatgtgggcaagtcaccaggcttctcaaacataaaataaggctcttagatcggatttctctgagacccttgacaattccgtgtttgttacttagggctgctgctgcaacaaattaccacaaactgggcaacttaaaacaccagaaatctatcctctcccccattccaaaggccagaagtcaggtgtcagcagatgtggtacctcctggaggctctgagtgagaatgtgctccatgctctctcctggcttctgggggcagctggcagcccttggcattcagggcttggagatgcatcactctatgccctgcctccattttttacattgcctactctgctgtgtgtctctgggtctcaaatctccttctcatttctcttatagggacaccagtcgttggatttagggctcaccctaaatccaggatgatttcatcctgtgatctttaatttgctgttatctgcaaagacactatttccaaataaaggcacattcacaggtaccaggtcttaggccttcaacgtatcttttggggaaacataattctacccaatataagctgtagacgtctatcagttactcaagcctggctagatatcatacagaagacacaactaaggactactcaaggctgaaatgtttccttttttttttttttttgagacagagtcttgctcggtcacccaggctggagtacagtggcatgatcactgcaacctccgcctcccaggttcaagcaattctcctgcctccgcctcccaaatagctggaactacaggcatgcaccatcacacctggccaatttttttttttttttttttttttttttttttgtatttttagtagagacaggtttcaccaagttggccagactggtcttgaactcctgacctcaggtgatccgcccgctttggtctcctaaagtgctgggattacgggcatgagccaccgtgcccgtttctttttcttttcttttttttttttttaattacctgtagatccatttgtggattattcaactacccttaacttgaaagttgagtgatctttttaacgtttttctcttttcatttcttaaaatactggcagtgagtcagtctccaaatttcagatactgatattgaacactaccctccatgctaccagatcatttattttggtttctgttactgattcccggcctccaagtccccagaagcacagccacagcggccgtgtatgggtcccagctgccttttcactcctcgatgccttaagtcctgacgatgaaggcaaggacccttagaagaatcacacggaggcctccatgtttcctgagctctgtttagaaagaatcaaatcagtctcatataggccacaaggagaccagcagtaccatgtaacctcagacatgacacaaagtgtccccagcacatcccacgcaagcattattttttaaatgcatttgcagtagggaaaagtatttctgatacttctatacctagttgtaccaaataatgcatttgtgcagttgatggatgaggtgaacaaaagcaatccttttgcttccttgacgaatgtagttctgcaggcttcatggctggcaaaaccaatcctatagaacccaatgcttggagacagagctccaccaggaaacaaggccaagctgtgtgctgctcttacgttatgtctattttagaagttgactttggcagaggtgttgaccactgacacaatctatctacttccagaaaagataagcggggagggaatcaaacaaggaattgtctttaaattctcacttggaaacagacgccttggcttgaaaaggggagtagaatactagcttcaatgatgatgaacaagttggaacaaattataaagaaaatattgaagctataaataatttatttttaaagaacctgtgtgctaaaatatctcctgactaggaaattctaaagaatgtaaatctccagattatagtctatctgaggcaatgtttttccagaactattggaatgtgtctacataacaaactcaataatcttttgaagagttcactgttaagaggactcctaggacacgaggagcaacgggatgatcacacactcatggttgtaccttcaagtaaagaaaaatgagaactttaaatcacccaagatgaggaagctctgtagccagactgctctcattcaaatcaccaggaatgtttcaatctgatgccagctttctcccttacaacagtgaatggataaaaaggggaaaactcaaaagggatattcacagcgccttctagttcccacctcagtcctatctcaaaatacctgaaaattctgccacagccctttttcctttactctagaacgaaatgacaaaattaaactttataaaagtttatgaaacgaaacctcacaaaacctgttactgaggttcaacgatatatttttaaactaataatgtgaatttttccatgctgaagagtcatgtaattgggtcaccaaataaaaaaagacacagctgtaatagaaaccattttaggggggaagaaagtcctgactaatcacgaagtgatgcaaatgcaaaaggaaatacttagactgtatttttacccagctgagtagtcagatgtttggaaatgccctggatttttcgaaatatttccagctgttaatagcaaaacggctcagatgcttcagaaagaaagaacacacactgaaaccttttttttttttcctgtgtacttttcttaattacagctgctcccttccaactgcaagaggggatctaagtgtaaagatgttaaagcttagatgttcaccctgagctccacacggatttatttttatgaaaatgactgagaagtgcaagcctgggaatacgcagagaacttcaaaaaagagcctggaaaaagtaggaggtgataaaggagttagcacattttcagtttgtttctcttacaacctgtgagagaacccagacagctgatgggctcccggagaaaactcaggtagctgcactccagagagtttggtgaggccccagccagcaccagagacctgtggtgagctggcctccaggagaaggtggtgacagcggcagccgagttacatggcgccagatcccagaggacgagctctggcaaccgcctgtgcactcccctgcagccttttcttcagaagtgaagatgggggagtctggtcaaccacaggtgaggtggcaactcagagggaagcctgcacactgtcagctcagccaaccctaatgaggaccagacacccagaaatatttgcagactcagcaggggcgggagtgagaagtggagttggctggcctcaaaccaccaccagctgagcagggctcctcagccagggtgtgtcttctgggactcccggggcaaaaggtggcattagagatggaaattcaaaacaggctgggggctctggggccaggttttgtcctgggcgactgcttggcactttccccaaaacagcacacggaacctgtgaaaaatgtgctctggcccccttcaaccttgaccctgaggattgagggtgggaactgcggtgggtttgctcaaagtccttatcaccactcactggcatgtgttccctggctcagagcctgtccctaagaaatgggaagaaaatacacagctcccaaggagctgccagcagttccacaccaggaccctctgaggccagcctctctggggacggtgcatgctgaggagtccatgagaaggcttaactttctgaagatgtcacactcagctcttcttaggtaaagatttttttttttttttttttgagatagagtctcactctgtcgccaggctggagtgcagtggcacaatctctgcccactgcaacctccgcctcccaggttcaagcaattctcccacctcagcctcccaagtagctgggattacaggcatgcaccaccacgcccagctaatttttgtatttttaggagagacggggtttcaccatgttggccaggctgatctcaaactcctggcctcaagtgatccacgcgccttggccttccaaagtgctgggattacaggtgtgagccaccacgcctggccaagattacctttttagattgctaatctggccatctttgattagaagtgaggtcaatacataaaatgttccaatcaaattctgcaacataatttttcagtgttcttaaggaaaccctacccatgagcaaaatggcattaaggacaattggtcattcttttttatttattttgggaggagggggagaaatgaggggccttcattgttcccacttcaagaccagcccactggttacaaagcaggagaaaggcaggggcgctcccaggaacccagggccattgttatgggctgaattgctccctaccgccaccaaatccactgctgaaatcctaacccccaggacctcagaatgtgagcttatttggaaacagggttgttgccgatgtaataagttaagaggaggtcataccgacacaggtgagcccctaacccaacatgactggacttcttgtataaaagaatgctatgtgaaaagacaaacgcatagacagagagaaggtgatgtaaagacacagggaagaggtggccatctgcaaaccagggggtgccttcttgagaccaccagcttctaggagagaggcctggaacagactccccctcatgacccatagaaggaacccaccctactggcaccttgatcttggacttccagccccagaaccatgagacaataaatgcctgttgtttaagccactcagtctttggaacgttgtcccagcatccccaggaaactaaggtagccacatatgactttcatgggcccctggcacttttgtctttgtgggccccattctccgtaaaaaatatccagaatggctccacaactgtgttggtatagaggcaaataaaatctgggctggagcatgttcattttttcttctgattttagaagaaatgaaaacattttcatgggtctctaaaagtcccacaggaccttggctctgtgcctttcacacctcatggagaagtccaccctgtagaaagaatcactgaggtccccagattgggtcgggcacctccccggcctttctctattttggcaccacacgcaaattacctgttattgtgtctaacagctccctctccccacctctggctcacactccagcaaaaagacatgtctcatttatctttgcagccctggcacaccttaaatgctcaataaatagctgctgcaccaacttgaactgaacagatagagacctaagttactcaaggtcattagtgaaacatgaagcaagaaaagagcaaaagaaggaggttttggcaagaatggagctttaatagctggagcctcagctcctggtagcagagtgaggatctgggagctcggcccaggaaagtttctgaaactgcagtaaaacgagtgttttataaccacctattctgttccattttttttctctctctgtcttcatctttaaattttgtttttcacagtccagagctttgtggggtttattaatacttacatcagttatactttgcctttcttcaaatcagagtttctcaaattctgacttttccactgagattttctgacagtagatttggcctttctagacccaacctcacttacggttcatgacaagtttataactcgttctcatcttgggacaatttctacttttcctgctgaccatgcttcatctttgccatatctcagcatgaaaaaagttattttctccaccagaaactcacatgagtgaacaggaaacccttggttagcccttctgccaccacacaaaatttttaaaaagaaataaacagtcattcttctggacactggggagagataaacacaaaaacatacagtatgattgggaagataagacgtctacgtttctaatcatgtgtcataatcatgtgtcataaactttcagaagaacgttccacaaaaagcactcaatgggagactaatagtgtcacacaagtggaagattctaaggacataaatttgggaggtgcaggattaaaaaggcaaagacagtttctataatgcagaacttctcagatccttgaaagtgctaacatgctagatgaatctccatgaggcagatcaaatagcgggcacttcctagattgacttgaccacggaatcctcctacgggggagtggggtacggagagaggtgtgtggggagaggaatacatgttccaaaaataatctggaaaacactagactagcaatagatctgtcaagtttcaaagatgaacaccctattttcacaagaactttctggcataaggaccattcactgtgactattcgcatgaggaatattcactgtgggctgaagcccttggagagggtgtcttaatagtagtgtgattcgtattcaggctcaaaacacagccagatgggccttccttagtgagagaggagtgtgaggaggatgtattggctgggaaaatcacttcagcaagggaaaaaatttacaagctgtgtttgaagagcaccagaagactggtgtggaagggttaccattgatgaaaccagaaagaggaggagacatgggtgggaaggagtgttcgaacctgaccatgagtgagagtctcaccctgtgggatgcatgggaaacaaggactcaacctcaagggaaagcacaccccatgggtgctggaaaagcatcaccaaattaggctccaaaggataaaaatgctgcttcctgtctgcttggcgggagggaaggcggtgcccagtgagcaggggtgtggacctggcatctggtagagcaccacagcataggggcaagagccccaggcgcatcaggaaagtcacgttccacacccagtgctcccgtgacttccaataagcaatttaacctcccagggactcaatgccctcacctgtaaaataaaaggaaatgacaccctaaggttttcccactctaacaccctgtcggtccatgatgatgagaacttcccatctatccagcgccaggcagaggtacaggtaatgggcattttgaggccagacaccacattccattctctcactgtcagcttcacacagacggtgccgggcccacaaaccatctctcacacagatggggaaggcagccgtccccatctgggcagctgtgcagccaaatacagctgcctgtacaagggtgggggtctccttggcacccaagaggcacaaattctgaaaaaactaagggacagtatactggggagccagaggaatttcatggggtgtcctctccgcttttgaaatcaggcaagatcatggccatgctgtcttgaatcttaaacaacagaatcaatcaggtttatgtttccttagctacttcccgaactacagagaatcaattaacagttcctgaatctgtaaaattaagaaattagtgatagcttcatagagtttcagagtgaattgaacggcataggtgatacaaaacacgaaactccatgcccagcccagagtgacaagtcaatcaacattctgggctttgaggtctatacctgttgtgctcaaacctaatcatttcccagggtgcatcgctgatatgctgtgccctctgtctcccaccacctgccttgcatctaatgctgctccctgcgtctcagtgggacttggctgcagccactcagggttcctttattccagtgccaaaatggacatcaagaggactaagaaaatgtagtcccatttgggcatcttaaactcttaaacttacagctgacactataattttagctgaaatattggaaaatttttgtttcccattatcagcatgattcttacttactaagatgaaatatggtttcctttggttaaaaaaaaatacccaatatgttttaaaagatgaagtaatgcttagtaactttggttgttttttaaaaccccttcctattaactgctcaagggacaggttgtaatgttgatccacgccacagtgtatttgcttcacttcctgcttctggctgaccctttaacaggaaaattaatagggaacatgagtcaattaatcagaatgcatagttatttttatgaactctactgccagtgcattaattcatgacatgtgtttcaaaaattggaagaatggcaaaaatataggtatagattgcttatgatatatgattccaaaagtcagaaaccgtgagtcattcatccattcattcattcattcattcaggaagtgttcattaagtacctactaagagccagtcaccattccaagcattggaggtaatcgatgaatcaagtcaaagaggcacaacaggcatgaaacaaacccttacacattgatttatgatggagatgtggaaagggtgggatggcacacaaactaggggccacaccagaggtctggccaaggtttaagaggcaccgagttgcagccagaaggctgattagggactcccttgatggacagatggggagagaggacatagtgacagaaaggcactcaaggtagtagaaatttcctatgaaaatgctctatggctccagggagcagcgcgactgaaaatagtcagaatataaggtccacaggcagggggaaaatgagcaggagttagatggaggaacagccagaactcagaagacttgagtgccacacaaaggaggtgggcttcatcctcaggcagtgcagaatttctgaaggggcactgtggtcacacgtctaaaatgtcaccctggagacagtgaggttgatgggaagggcaagcctggtgggaaggagactcacttggaagctgctatcaaggttcaagagaggaacaatgagggtctggggtgagacagtggcaccagagagaaaaagcagagtgcatttcaggggtatttggtagcacgcctcagcagggtttgttcatggatagaggtggggtgagaagaaaggcctggggtggtcactggaggaaaggcagctccatcacaggacattatgttaagtgaaataagccagacacagaaagacaaacatcacatgttctcacttatttgcgggagctaaaaagtaaaacacctgaactcatggagatggggagtagaaggaaggctaggaagggtagtggggaggtcgaggggaagtggggatagttaatgggtacaaaaaataatgagaacaaatgagtaacacctagtatttgcaagccacaatggggtaaatacagtaaaaaaaaaaaattgtacattttaaaataactaaaagagtataattggatgatttgtaccctgatgtgattattacacattgcatgcctgtatcaaaatatctcatgtagtccataaatataggccacaaaaataaaaaaattaatttttaaaaaataaataagaaaaaagaggcaaatccaccaactcaagtataggagggaggacgagaaccagtgctggggaaagatcatgtgctccattcagccatgtggatttgaggggtccgtgtgccactcaaaaggcaggtgcttgacaagctgctgtgtatgtgggtctgaagctcaagaagtaagtctgggctggtgaaagacatttggaaatcatcactgctatcaccatggaaaacaagagaggtcatgcaactgattacccaggaggggccagtggaaaaagaggagtccaggaaagagataaggagcagcccaagaatgatgcagggagacagatgatgataaagagaaagagctttgcacatggaaagcaccagagtacagcatttacagaatgtgaagcttacattgctaaatgaagcaagaagagaggcaggatgatccctgaagcgtcagtgcttgcaaatttcaactctgatgagctcaacatatggcactgagcatccaccatgaacgaggagatgccagctcatctaaggcaccaggcacagtggctcatgcccataatcccagcactttgggaggctgaggtgggaagatcgcttgaggccaggagtttgagaccaggctgggtaacatggcaagaccctgtgtctgcaaaaaatttaaaaattatccaggtgtgatggcatgcacctgtaagtgctactcagaagtctaaagtgggagggtcctttgagcccaggagttcgaggctacagtgacctctgttgatgccactgcactcagcctaggcaacagagtgagacccatctcaaaagaaaaaaagagacagaagaaacccaacggctctcacacttgaatatgtgtcagaaatacctgaggggtttatttaagtacagattcgtgggcccacctcagagatttcaatacaatgggagaccccaggcacctgcacacttcacaagcacccaaggggttctctgaggacagttaggaaatccactcttagaaatactgtgaaagtgctgcccttatgtcaaaactagggacttttcttaaaagtatttctcagaagtccctagtatcagcttctcttccactcagaaaaatccaggagacttcaggattgatttcatcttccaagtgacttcaaccttgtagccttcagtgtcctcaaaatggaatcagcagttctcattgttagaagaacaacctgggtgtttaagaaaacatatctgcaattttctgcttccaccctgcctcctgaatcaggctcccagagacgaagcccagcaatccagaaatttctgaggtcttcccagtagattctatgtttcagccaggtttggaaacaactgaacagatcatctctaatccaatgtcaacccctaagagtccctgtattcaataagcacctgcaagaggaattgtgtttggactgccaaaataaggccctaataaacctccctgtcaaaaaggaagtttaagattccttgatgtcagcagagcctgcaagagaaactttagtccaactgtgagttttcagagtaaatattattacaatgatgtagaattttagctggcctgattaattatgcagtggcagcacttcaatgggttgtgggcctaatataagcactccattctgtcattgttactatcaagttcaacagcctcctcaaatcagtcagtgaggatttagcattgttgttacaacaacaagaggaacccagggaagaatgagtgctttcgtcagctctaaaatagcaaacttcagtaagcatatgtttaagtcagtgccaaacaacagattatctggctaataaggattattaagggaagtgagatgcctaatacggagcataaatgggactatcgttttaaaagtcccatttcatcagaggtaaaggtgacagatggttgcagatgtgcaggctgcgtcccctgcccttttcttctctcctgctgtgctgatctctacccagtgctagtaatggcctgtgtcctcagatcaggccttgctgaaaaagaaggggaatgcagaggcaggggacacatggcagatgttacttcctcttatgataatcccagggaggctacatggtagcacgcatcagcagggtttgctcacggatacaggtggagtgagaagaaaggcctggggtggtcactggaggaaaggcagctccttcggaggacatcatgttaagtgaaataagccaggcacagaaagataaatatcccatgttctcactcatttgtgggaactaaacattgattgaattcatgaagatggagagtagaaggatggttaccagaggctgggaagggcaatatggaggtcggggggaagtggggatggttaatggatacaaaaaggagttagaacaaatgagtaagacctagtatttgcaagcacaatagggtgaatagtcacaaataacttaattgtacatttttaaatagctaaaagtataattggattatttgtaacacaaagataaatccttgagggagtggatatcccatttaccctgatgtgattattacacattgcatgcctgtatcagaacagctcatgtaacccataaatacaggcacctacagcttcctacaaaacaggggagaattcctctgtttaaaaacctcagtaggattcccagtgcctacataataaaacccaaattgtttagaaaggtgagcaagagcattttccatccagcctttgctcctacccaccctttccttccctcactcccccacagccctacatacccaccattccaagaacagtcaacttccacttttcacaactcagggcctttctctgcatgttctgctgtctccagagcagcatgcttcctgctccctttcctcacctggcaaacctctcgggtcgggaggccgtcctggatgactctaaacagttgatccacccttggtgctctggagctttttaaaaactcctttaacattaaatactgtgctaaatgattatttatctaactacccatccaactcttccactggggcatgagttgctcaaggccaagcctatggtagattctcaaaaacatctgttggatggataggaagaaggaaggaagagagggaggaaagaaggaaggaagagagggaggaaagaaggagggagggaaagagggagggagggagggaaaagagagggagggaggaaggatagaaaaggcagaaaagggaaaggaaaggaaggaggagaaaggagacccggactggtgtcaggagactgatatttctccatctattcatacaacaagcgttcattggaagtaactattagttcaaggcaatgttctagtatactgagataaataagacacacctttgacccccacttaagagctcataaaccagcaaggaacaagttagataagcaagcagataattacattaaacattataaagtccaatagcggtacctgcaaggtgctatgatatcaaaaagaataatcagccacacagcccaggggaattgaattgaaagctgaatcctaaagcacaagtggaattgaaagcaatttacattttcagtagagggtcagggtgtgcaaaggcatgaaaataaaggaaaccctggacaaatttttaaaaaagaatgctgaaggtatgttagctagcaggtaggagaggcgaggctggggcgagaagcagggtgtggccatgaaggtgtttagaggaagtgtggacctgaatgtagccagagaggacgctctggctgaaacccaggcctttgcatgcaccatcccctcttggagcattctcaggctccccaccagcctgatcctgacatccttcagttagaggttccaggcaccctaccctttcccatcatgacactcatcaaaattcattaaacaattcttatatctggctgttccagcaaactggaagattcaccagggcaggcattgtatctgtcttgtttatcactgtatcctatacacctagaaagtacctgccctagagtgagccttccacagatattggttaaatgaatgcaataaatgcatgctcttcttggccaaaccttttcatcatggaatctgtgaaataatagagtcccacctgaggtggaaacaatcctggaagagagctgattctcagtcagcctctgacacccagacacgatgtgcttccagcaagacatgtcagctcaccaagccttggtttcttatctatcaaatggagctattggcctgaacgaactctaaggatgcctctaactcctaaagttgatgatttgtacctgatagtcgctccagatccatagtgttctatggagagcagttctttggtgatacgaagatgaaggaaagaactcagtgccactcacttccaggactgtgtcctcattgaatttgtcctgaggaaaacaggtgccaagttccatcttgactttattagatgtgaaaacatagtcagagatgaaaggaaaggtcacctctcctgggcaaataaactttctttcagtaagtccccaggagatggatgtggagagcccagggttttccactttgaagtttaaaattcccagaaagagacactatccctaaagccaaacccaggagacgggctcgaggtgcctccgaaggcaaaagccagtggtctgctccatgcccatgagattcaggggctagaaacaaatgaaagccatgattaaagtaatttcatctatgtgtttccagagactaattatatttattgcatctgacaccagtcagggacagcaaacatcttttgtgagccttacaacaaaagttgaaaagcattactcataatggctgattttgttttattacatctgactcaaagccaaaggtagacagcacttagagctctctgtggacattaatgtttgaatgcaatacagatagcttccctctctggcttcccaccagcacccacacatgctgccctcctgctctcagtatgtatgcaagtggttgtggaatagagaggcagtgaaatagctccagaatttgtcatgcagccaccatatcccaagcacattgctaggcactgatcctcataggtcgataaaacaagagaccctgccctctagggatgcactgggctggacaacagcccaccaacattaccctgtaagggcagtattatgtgccataacacagataacgtaagagtgggatgcgaaaatatcaagaaggaaagagtgagctctagttgggaaaaatcagaaaagggggtggcatatgaaataagccagcaaagaagaggttatgtattaggcagccacaaatgggaactaaattcttggtgccaaggacagcaagcaaggtgagaaaccgaggagggtagggcatgttcaactaaagcttaacatggcatgtgttcatatggggaaatagcacatggtggcacaggaacgacgaagcatgtggctgatggccttgaacactacctgaagagtgggcctctgtttgagagtaaggagcattcatgaccttgagcacaggagtaagctgcaaagagccacactctaagtaggttagtgcaggagtggtgtgaggtacccaggccggcagggcttttaagaaattgccttcaatggcctggttgagaaccactgctccagaacacagtcacgcctggtgctagggtctatagtattgcttcagtgctaccaaaatgaatatggtgggcttggtaagtgttaatctgctgccttaagaacctatcataggtccatagataaatgcagtttcaagccagtgccttataaacaacctttgaagacaacccatttgtgagttatatactgccttccaaatgatgaagatttgcttcatatctttaaggggtgtttccacttttaaagagaacttgcaatctattagaaaagatggcagaattttagacaaaggatccagaagctccatgcatgaaagtatttatgtctacctgctcccatgacataaggacaagaacataactcaccatggaggtccccactgctacacagcagcctgtctataagagccttgcacacacacacacaaagtggtatgtctttaaaatccataaaatcttcacagagttaattttactggaaaattgttctctctttttagaacattagtccctaaggacagactacagggagaaaacactgtttttataagcttgcctaagaaaattattacaccccaaagtccatcatggttatgaaattccattgcatccgtctcttgtttatttactttgaaaccaacattctaaatctacttgggatactcaatgcaaaataatactagttctgtttatttttatttggctttaaaggaaaaaagtaggggaagaagagggatgaggtctcagttaatgatcaagaaaatatggcagaagttgacatctacctgagataaatcaagatcaaatctttgtatctcttctttgtcaatggatcctttcttctttccaagcaatacatttatgtctttctagattgataattaatatcccatattaattaggctcatgcctataatcccagcattttgggaggctgaggcaggaagatcacttgagcccagaagttggggatgagcctaagcaacaagggaaaaccctggatctacaaaaaataaaaaattaaccaggcatggtggcgcacaactgtagtcccacctactcaggaggctgaggcaggaggattgcttgagcccaggaggtcaaggctacagtgagccaaaatcacgtcactgcactccagccagggtgagagaacaagaccccctgtctcaaacaaacaaaaaaaaaaaaaaaaaaaaaaaagactcaacagccactggtcaaagtagctcaacctgaagatctccctctggtcaaggatggggcaatttgaactctcataaagatgagaattgcaatggattaaaactgatcaaataagtttaaacccatgagttcataaaggtattttttcaaacctacttgataaacttttgaaagtcaacagcattatcttgaaaacttagtaaatacaaggaaaacgtaaaacatttattttagattccttatgaactaagccagtaaataaccaactagtagatgaaagaaagaattttctaataaaatcattacagctaataaatcaaagcagagtgacagaatcagaaatcaacagtctgcaccctgcagtgaaagaatggatctaggcaatgtgcatcacatctgccaacatcaaaaacaaggagccaacaggcatgtgaaagaacacagactcacctacaatccgccagcccaggaggctgaacctgaggctgttgaagcttctggatccagctgccaacttctaggaggtcagaaaaccgaggagcatgttaacctgcaacatgagtgcccaatcagccaaatccagattgagaaccactccgtgggtcaaacggcccaggttcttcaatacataaactgtaagaaaaatagatggaggaaaacctgtaagctaagagacagcagacagacagaaagacatatataaaattatgtattaaaattttacacacacacatataggcttttttaatgggaaaaactacagcatttagagctacgtgtttttaattaatacaaaaagatgcaaaggatttatcaatataatagccaggatagtgattactttgggcaaaagcaaggaaatttctagagtaactgacaaaattctagtaaaataaaatggtctaaaaatgaatttaaaagtaaaacaattgttattttattatcattatactttaagttctagggtacatgtgcagaacgtgcaggtttgttacgtaggtatacatgtgccatggtggtttgctgcacccatcaacctgtcatttacattaggtatttctcctaatgctatccctcccccagccccctaccccccgacaggccctggtgtgtgatgttccctaccctgtgtccatgtgttctcgttgttcaactcccacctatgatgagaacatgtggtgtttggttttctgtacttgtgatagttggcttagaattatggtttccagcttcattcacatccctgcaaaggacatgaacttatccttttttatggttgcatggtattccatggtgtatatgtgccacattttcttaatccagtctatcatagatggacatttaggttggttccaagtctttgttattgtgaatagtgccgcaataaacatacgtgtgcatgtgtctttatagtagcatgatttataatcctttgggtatatacccactaatgggatcgctgggtcatgtagtatttctagttctagatccctgaggaatcactgcactgtcttccacaatggttgaactaatttacactcccaccaacagtgtaaaagcattcctatttttccacatcctctccagcatgttgtttcctgacttttaatgattgccattctaactggcgtgagatggtatctcattgtggttttgatttgcatttctctgatggccagtgatgatgaacattttttcatgtctgttggctgcataaatgtcttcttttgagaagtgtctgttcatatcctttgcccactttttgatggggtttttttcaaaaatgataaaaatgaaaaaaatgttatttttaaaagattttcaaaaaaagtgaatccattacgattagggataccacatggtgaaacccttatgatagacatctacaaaaagaaatgtctagaagtcttgaaactttcataccaaaccaccaactctgaatggtgggtggcactgaggggccaggagtaagagggggagggaaccaggagactcagtacaggagcaggtttatgttttgctcaatatatttttgttctgtttgcatttatactagcaacttttcatgtattattcatatagattaaatgactcaatcaatctaggagtgagtgagctatcaattgcccaagcaagtgagtgagtgggcaaatgaatggagaaagaaaaaagtatcccagtatcataggcaggtcctaatagtaaagtcttcataaaatcatgtacagtaaactacaaagcaaaaaaacagatcatgcaaaatctgatcaacccagacattttagagcctgtgtatgtgaagacacttaagtccctagtcacagatacaatgagcttatatgctaaaattttataaatgaaaattttacaaggtaacttgttgatcgaccagtcaaatatgagttcagaaccagataccatcttaaatgatccctgtgcccaccctaataccatcctgcctgccctccagggaccctccaatcatgagaccctaactaagaagtcttgctgcccaagctgggcacggggactcccgcctgtaatctcagtactttgggaggccttcaagggaggattccttgaagccaaaagttaacaccagccctggcaacactgggagaccctgtttctgtaaaaaaatttaaaaattagccaggtgtggtggtacacacctgtggtgccagctactcaggaggctgaggtgggaggatcgactgagcccaggagattgaacctgcagtaagccatgatcacaccactgcactctagcctgagtgacagagcaagaccctgtctaaaaaaagaaaaaagaaaaaaagaaaaaagaagtcttactgcccctttaaatttcatgacccccagagtatttgaaagcacatttctgaatccacccagaattacttctttacaaacattccaaaaaaaaaaaggcgggtcgtggtagctcatgcctataataccagcactttgggaggccgaggcgggcagatcacctgaggtcagggtcaggagttcgagactagcctggccaacatgatgaaaccctgtctatactaaaaatacaaaaattagctgggcatggtggcagtcgcctgtaatcccagctactcgggaggctgaggcaggagaatcgcttgaacccgggaggcggaggttgcagtgagccaagatcgtgccattgcactccagcctgggtgacaagagcaaaactccatctcaaaaaataaaaaccagaaccaaagcctctgactcacttatcaaccagtgtccaaattcagagtagagcagcattctttcaaaattgaagcaattgaaaacaaaacaaaaacaactctacctccaaccaaaaatcatatgtaactctgagaatccaagttttcagatgcttgttggagagagaatgtgttgcttaacttatctcagcctcagtcagggtcctcatctataaaatgggaggataagcatcccctgcctcactaaggagttataaggatttcacaaaatcctgggaaactcttagcacattgctaggcacacagcaaatgctcaggagatgtttgttgtggtcttaattttttttattaaggcatgttttaactgtattaccttgggtaaagtctggtaaggccagatgcaaaacaggagagataaactagaaagagttttacagatttgctactcacagccctgtggggagaatgcagcgggtcacactgggccactctgggaagtgttggctaccagggtcgacagaaggagagagtaggaacaaggaaagcgtcttcattgagaagaagcagggaggtgggggggagtctgggtaagcaggcttagcattggctagtctgaatcatttcagtggactcccagccataggggctgtcctgagttacctggtatctgcccctgggataattatggcaggtggatagtggctccaagtttgagaggttaattgtattagtcccttctcaccctgctgataaagacatacctgagactgggtaatttataaagaaaaacaggtttaatggactcacagttccacgtgaccggggaggcctcctgatcatggcagaaggtgaaaggcacgtcttacatggctgcggcaagagagaatgagaaccaagcaaaaggagtttcccctcataaaaccatcagatctaatgagactgattcactaccacaagaacactatgagaacagtatgaggaaaaccgcccccatgattcaattacctcccaccacgtacctcccacaacacgtgggaattatgggagctacaattcaagatgagatttgggtggggacacagagccaaaccgtatcactaatacaagaggtagctgggaatactgacgtcatcagctgctcaaaaaggggaactgacagcttctagccaagtcctcaaaactgggccaaagcagcattataaaaactatattacaaggtaaaagtcacactacataaaatcagccattttaaaataaaacattcaatggcatttagtatactcacaatgttgtgcaaccagccaccacctctgtctagttccaaaacactgtcatcatcccaaaagaaactctggactcataaagcagttactctccattctcccactgctaccacctcgtttccagtcctgccagatcctggcaatgaccaatctgccttctgtctctatgggcttacctattccagatatatgatataaatttaatcatacaaagtgtgactatcatgggctgaattacgcctccctaaaattcacatgttgaagctctcaattcccaatgagaccatatttggagatggggctttttaagaggtaattaaggttacatgagatcataagggtggggccctaatcccataggagtggtgtccttatcagaagaggaacacacgccagggatgtgagtgcacagaggaaaggccgtgtgaggacacaacaagaaggcagccatctgcacgccaaggagaaaagccttgggagaaaactaacctgccaacaccttgatcttaaacttctagcttctagaactgggagaaatcaatttctgttcttcaagctgcccagtctgtgatatttcacaatggcagcctgagcagattaacacagtggctttttgtgtcacatagcataaagttttcaatgcattgtaggaggtgtcagtacttcattcctttttaatggctgaataatattccattatatgtatataccacaatttttttacccattcatccattaatggatatttgggttatttctgccttttgggtattgtgaataatgctgccataaacattcatgtccatccatttgtttgagtaactgttttcaattcttttaaatacataggaatgaaattgctgggccttatggtaattctatatttaacttttcaggaaccagcaaactcgttatttttaaagtattcacttcagtgcctatcacgtacaggccctgtttcacagagtgggtggaaatatctatgagccatcatccctgccctactgcctctgcaggttctgtctgtgagaaccattcctccaaaagaaaagcagtagctataattttccatgggatcttagttttattcaaaatgagtacctgggcaaactcatgacaattgaacctcaaatgtcaaagtagcctttgttttccaaatatttatatttcaaatgtttatgggcaaatagacctattctcttaattaatgctgatatcctctaagtaggccaaacttgaccttctacagcatcaaataaaatatatttctaggcctccgatcatacacatccatgcatgaatggatacaaaatggcagaaaggtcagagagacaaagactgccaaactggagagggatcgattaacagagttcgcagaaacacggacaggaagaaaacatagcagacctcagagaacctaagccagggcagagattcaaagaggagaacaacacaagaatgccaggatgcagagaggatctaccagttttggaaggaggcagggttaagagatgagagaggaatgttagtttcatgcccttgccaatatctttcatagctaattacaccctgacaacctataaattcctctaatagttttcactggagaaactattcttctacccactcctacaaatatgaagcagggtcgctggtccagactagcttccagaatcacccaagtggtgctgattatcagtggtgggtgtggacaacggagaaaacaagaaggcatttttctgagagcccttgtggcaaaaatcaccttgtatggtaaataccagattccacacatcaagtgtccttatttcctaactgaaagaaataactaaggagtttctctctttcttgctctcttctcttctctctctctctctctctcctcttcttactctccccactctccccaacccctgacctgaagatccacacaatagctaacctctctaaccaatcaactctcaaagtctatttttcagagacatgggatttctctttctcaccatggaagggttcggattccacatatgtcacctaggagacaaaaattgagtgtttcagagaaaacaagctcactcgtctccaaccagcactttctctcatggttccagatgaagaccataatattaagcatttctacggtacctttcgtcttccagtacttttcacacacagttcaggaaaggagggagcagtggtaggctgacacatcacctccaaaaccctagaccactgtttttcaggtggctagtctatatcgcgactgtttaaataaagcagaaaccagataaaagctcattcaaagggaccagttatagaaagagagtgaactatctaggggcaaaagaaagtaataaaatgttcaagtccccaaacataaggttcatctctgctaagggtgactgactgtggagtcaggcacgcctgtttcaaattcttatcctgccacttactacctccatatcctctgaaagcattaatattctcattggggaaaaaaatgggagaaattacctacaaaataggtttaagtgaattaacgtctagcctaatgatcagtaatggtggtggtagtaataataatatgccacacatcaatgacccaagttttagagtataatttattatgttatagagctaaatttttctaaaatattaaatagtttgaagacccttgaaagtgttgaaaaagtaatgtgttttcacttttgagaaatttgcaggttggttttttaatggttttaaagcctctgcagctgacagcagggcattattcatgcagcaccagtgggtaaacctaggcccttccatgcttgtgtaaggatatctgggtgtgagagatgtaccatgttataaccatacaggcttcttctccaatccatcaccatgttcaccgccactatttcctttctgggcaaagacttggaggtggcatcatttgtagaaggaatttctccagggcacagaaagacttcccaagaagtactgatttaaggctgaaagttgttagtaacttctatgagtgaagacaggagtgaagaatgtggaggcttacaattgctttctcatcaacagataacttagacatgtgaaataatttttttaccttgtagatttgggacaacatcttcccttgaatacaactaatcaaactgggcttgctaggagaattttgaacgtccaactgcatgttcactgatggctttaaaatccatatctccagcacagatcttgcctatgaactcccaaaccatcaattccacctggacatctcaaattccacatgtccaagtctgaccttatcatctccttctcaaatctcagcccttcttccccacctcctttgaatctctctcagtgcatcttcctggatctggtctcactgggtagaaactgaggggtcattcttggcaccattttctccatctctgcaacacacatgaaaggcaacccatcaccgactcttgtccatctgcactgcaaataaccatcaggtctcactgcttttctccaattccatggccaccaacctacagacccaggagaccaatatttattgcatgaactagccctccagcatctgccttggccctgtcctattctcttcctcacagtgaccagaataatcttctcaaagttctaccttaaaacccatctggacttcccactgtccatgagtaaaggagaaaatcctgagcatggccttctcctttaccatgctcatcatgctctgacctcacagacttccccaccctgagctccagccagagaacttcagttatacacccgctcatgccaaagggtatttactcatccatgttcttcccctctcagaggctctctttctcctaactccctcttccatctgaacaattcctactttcccttcaaatcttcatgtaaaaatcacttcccaaaaaaactctcttggtcaggttcgttggttccatatggtcccatgtgctcatggaactgtatctctttctttcattgctctcctttcagtccactttgattccctcaccgttgtgcccatgtgtcactgtgtgtcccctgctagactgtaaggtcagtaagagcagggactatgtctggtttgcccaccattataacctcactgccaagcccagtgcctggtaaaaagaaggcacttggtgaaaatagatgttgaatgaatgaatgagtgaacgaatgtaaagaggtatatgacacatctaataggaggatgggggaatttgagtgtaaccttaaaaagagttcttctataaggccgggtacagtgacatgcacctgtagtcactgctcaagaaactgaggcaggaggatggctagagcccaggagacgcaggctgtggtgtgctatgatcatgcccacggacaggactatactccaacctgggcaacatagccagaccccatctattttttaaaaaaggttctgtaggacaaaatctcagagcatggcaaaggaagggcagaagggatattgtttcccaggaaaatactacagcaaatttgtaggaagaaagggtgcaaacacttgggtatcctcccctcatgtcaccccttggaatctcagctttccgacggagcaagtaggggtggaagtgcttggaagaaaagaggaaaatgttgcaaaacattctaaagctatcaggacaaaatgtatacgtgccagagaacatgaggtagaaattgtacttatctatagttttagaaaatgagcaaggaggctgggcacattggctcacatctgtaatcccagcactttgccaggccgaggcgggtggattgcttgaggtcaggagttcaagaccagcctggccaacatggtgaaaccctgtctctattaaaaaatacaaaaattagcagggcatggtggcacaagcttgtagtcccagctactgaggaggctgaggcaggagaatcccttgtacccgggaggtggaggttgcagtgagccgagatcacaccactgcactcctgcttgggcgacagagtgagactccatctcaaaaaaaagaaaagaaaagaaaatgagcaaggagatttcaaaaaaatatccatgtattttatatcccttacaaatcacatagctccatccccatcttaaaacccatttgaaaatttctaatgaatgaggagaaatagtcctcagccctcctccaaggtatccaagggagtgagaccaggcaaaggttttgtatgtcacaaaagccacatcgtgttccaaaaggaagatgagtagagatctgtcccacccagcaacaaagaattcctcagcagagagcagaaactgatctgcttccaagctgagactgcaggaggatgtttgcccaaatgctgcaatgacttccagtcatgcctttgtttggtttcggtaattacttgttcatttaaaaagaaaaagaaatatatgaaaatgaacatttctctcacatgtctgcctacatttcaaataaaggtttcatgtggcatcttgaaggaactgaaaccctagtaacgcaaggagaaaaccatcctgcagaaaaactggcaccccccccaaaacagctatcattctgttctttccagcacgaaaagggaaagtgtatttctctgtttacctttacattttcaactttaaagcaatgtcaacaataacctgacattgcatttcaagcagaacaacagcattctaaactccggcattatagaaaagtaaaaaatggatatgcagctggtttctcttgccccggctcgtaagatggagaaaatgtttgaaaagtaaatcccatgaattacaggtgatgttgtcgcacattcagccttctcttatcccacctgtcttactccagcgtctctacctgagctacctccaagccaacatagagcccttttcttctaagtttgctaaactttcatctttacctctctgacattttcttgccttgccaaaattcctaaagctttcagggtggttaacaaacagtaggtgtcagcctaagggttaagaattcatgctcccagatgataatcatcagtagattgttctggaaaattaaatacacctgagccaagtttcttaaggctgtactctggagatgtttcaatttattttttaaaaaaagaagaaacagttcaagaatgtgaactttgtttctcacatatattttcctaggcttcttttctttccttttgttttttttttttttttttggtatttcactatgtgctttggcttttccccagatttttacctacccttgtcctctctgacatatgaaaaatgttcttgcattctgccaccttagcaagggcatcgaatgacaaaagaaactgttcattccagaagtcctgatggcactatcgttagatttagactcacctatctgcacagacttccagaggcaaggacagacagcacgtggctcactcgataggtggggcattcattcagagatgctcacttagtgcctactatgcaccaagcattgtgcttgcagtgaggctccaagaaactaatagggatattctagttctccaggaattcccctctgttgtgagtgatggactagaatagaagtaggcacaggctgtaccagaagagcagacacttgctatagaaggaaggccaggaacactgcttgtgatgtggctactgcttcactggacggtgaaggtgcctaacagccattccagagagaaaggccagcagagacaaaggcacagaaacatgaaagggcagagggtgatggagacacaggtgtttccaggtggccagaccagatcacagcaagagtggcaaaaatgaagcctataaatatctgttgaaaatagattataatgggagaaaaattttgcaatctatccatctgacaaagggctaatatccagaatctacaaggaacttaaacaagtttacaggaaaaaaaaaacccatcaaaaagtgggcaaaagatacgaacagacacttctcaaaagaacacatttatgcagacaaaaaacatgaaaaaaagctcatcaccactggtcattacagaaatgcaaatcaaaaccacaatgagatgccatctcacaccagttagaatggtgatcattaaaaagtctggaaacaacagatgttggagaggatgtggagaaataggaatgcttttacactgttggtgggagtgtaaattagttcaaccactgtggaagacagtgtggtgattcctcaaggatctagaaccagaaatactattactgggtatatacctaaaggattataaatcattctactataaagacacaggcacacatgtttattgcagcactatttacaatagcaaagacttggaaccaacccaaatgcccatcaatgatagactggataaagaaaatgtggcacataaacatgatggaatattatgcagtcataaaaaaagaatgagttcatgtcctttgcagggacatggatgaagctggaaaccatcaacctcagcaaactaacaccagaatagaaaaccaaacaacgcatgttctcactcataagtgggagttgaacaatgagaacatacggacaaagggaggggaacatctcacacccggcctgttagtgggtaggaggaaaggggagggagagcattaggacaaatacctaatgcatgcaagacttaaaacctagatgacaggttgataggtgcagcaaaccaccgtggcacatgtatacctatgtagcaaacatgcacattcagcacatgtatcccagaacttaaagtaaaataaaaaaagaaaatatattttgagagttttggagtgtcatgctaagaaggttggatttatcctgcattaagaggggaaaatacaaggtgagctttccatctagcaagaggttcaaccaggagctctactagaaaacataatgcactgtgtttcccctgtggctggagaagtgtgcattgggagagtagaaaggagggcgaaataccttccaactgatggcaatttggggaggacttcacaaagaaggtggcctctgagcaacaccttgaaggatgagcagaactgagcccatgagagatggtggtgaggaagggtgcccagctgagagcagaggcacaggttggtgagtgggcatgtcttactcaggaaggagcctggggtcttctagggttggcctatggctgttggaggtttggagcaggagaaaagctggaaagttactctgagatcccattgcggaggcctttgaatgccttgttaaggatgttgtcctgaaggcaacaggagatctacaggattaggatttagaagttaactctggcaacatggattggataaggagtgagaccaggcaaggacactagtccagaggccactgcaaaaaaataggcaagagatgagaagagccttgtggctgagtctgggtgtgctggtggctcatgctgcccagcctcccttgaagctgggtgtggccctgtggaagatgagcaggaggggcatgcccgactaccagacctacccatcaatgctcccagagggcctcttcattacctttttccttccagctggcaggcataaagctgacctcagggtggccctggaagcccaataaacacggctgagccttcagcagcctgaatccctgaatgactgcatggacagggccacactggtgaccagctgactcacccagtactgttacgtgaccaaaaactaaccttctattggttctgtgacattttttactttgagatctatttattgtaccagcaatgcataccctacctaacactgatggttagatggtacagtggagatggaaagagaccgtcaaaagacattgtacaggttagtcctcaagacttggctacccatttcaagtggaaggtaagagtgaagagtgaaagatggcgccaacatttgcagcctggatgaaggggcaggtggtgaggccattaatctgaaagagtgaccatgggaggagaaggcttagaggaaggcaatgagattcaccggggacctgcagaagttggggtatctgtggggagaccggggtgggactgtgcagtgggcagttaggactacaggcatggagcctaatcatagaggccagtaaagctgcccaatcgcctccagaacagcccaggctgcccaggaggcctccctttgtactttcctcacactacaaaaaaaaaatgtagcaaatgtcaaagacacacagattgtattaattaattatttaaaatatcattgacaacaataggtgaactctgaatgggttacaggtgataaattattctgggttttaaaaatccccactctgtgcctcactagcatagcaggaaacttagtctctcagggcttctgttttcctcctgtgtaaaatggatgcctctgtccttgctgtgtggctgggaggaataaatggggtgatgtagtcaccagcccattacacagggctcagataatcaccagtatgtgtgattaccataagccattcttctaatattggtaacaacagctgacactgattgaattattcttagtgttctacctgatctacccatttaatcttgataactcctcgaggtaagtacctccattttccccactctatagatgaggaaatagaccagagaggttaggtagcttgctccaggtgatacagctaacagtaaagctgggctatggccccatcaggtagagtctggctcacggactctttcctgccacatgacatatccatggcaggagacacagtcctctcgggagcacggatgcatctccaatgactgaaagcacttgctcatcatttttgtggagcattcagcagcagagctggcagttctcaggaggttctaagtggttatgagaacctcgactcattcttgaagagcagttttataataacaggaaaaagtcaataattccagataaataaatgccggttgggcaaaataaccctgaggcttatacaatgctcttaatttttcaaagcatgtccacaggctgcatcccatttccaaagggcattggatacaagcccttcaaaggtccagggagggaactacggtaccctggcagagaatatggaagctgtcatgctgcgaagacagcttcactgcacctggccctcctctttctcatgctgaaccttcatgaaccaggaagacgagtacgatgggagagaggacagagatgggtcattgcagctgctctggccctcacatcaattgcaggacccatcccatttggaaatagcactgctgggaagaaccctctcgagaggctgctgccactgtcattgccactggtctctctcttttaggcggtcctattacttgtttcagtctggggacaaaggcagactggggtgcaggctctgctacaatgtactgaatgttaaagtaccaaaaggctaaaaccagagcaccaggatgatgcttgggaatactccagggcttgggatggctcagcccccagtgctctgactgatggagtataaattcccaaacaggagacactggatgctgtgctgcctccatgttaccaataggatgcccaggcagtttcaaaactgaagagtgtggagcccttctgtagggtagggggtctctgaccctgtctgcggggccctctccaggactcaagctgccatggccatcgtggccagtcctcagccacctccccagctctcaccactggcatgcaaggggagctgtgagtgctgaggccttttctccatgcacagatggcctcaggcccctctcaggattctgcagagctggtagacgtccctctcccagccaggatcctgattgccaggcttcagcacccatgaaaccccacatcttcttcacacagactgagaattgcattcacagtgggtttacccgttcacaggtctaacagagcacttccaccacaggcatttttaatgagctgtgagtgctgaggccttttctccatgcacagatggcctcagacccttctcaggattctgcagagctggcagacgtccctctcccagccaggatcctgattgccaggcttcagcacccatgaaaccctatcatcttcttcacacagactgagaattccattcacagtgggtttacccattcacaggtctaacagagcacttccaccacaggcatttttaaaagctgcccagggcgtctaagaggcaacatcttaaccgataagacccaccgattcaagctcttccatttgctgatgaggaagccaggcccaggatgtgaagagatttccctaaagtcacatagctatgaaggaaacctggtcaccctccagcatgacacagatgctgaaacaactttaatattttctctaggtctagagaagggacatcacctctttcaggggaaggggtaaattgtctttatttacttacacataataattcaacattttaatgctgaacattctacgggctctataagctactagaataaatgagttaccaagattacaggataaaaaagtaatatataaaaaagtactgtatttctaaatactagcaacaaacatcaaaaatagacatttaaaaaacaaaaccacttacaacagcattaaattttttgatacttagggataaatctgacaaaaagaacattcatctatacactaaaaactataaaacattgctgacagaaatttaaaaatcttttaaaaatggggagaaacaccatgtctatgagttgaaagactcaggattgttaaaatgtcaaattaatctatagattcaatgcaatctcaaacaaaatgccagcaatatatttgtagatatttacaagctaattctaaaatcagtatggaaagcaaagggcctattatagccagaacaattttgaaaaagaaataagctgaagaattacacctgatttaattgtgtttggggcttatggctttttaaattttttaattaacagataatcaatgtatatattcatgaagtacaatgtgatgtttaatatatgtatacattgtggaatgattaaatcaacctaattaatatatccatcacttcacctatttatcatttcttgtgatgacaacttttaaaatgtactctttgcaattttgaaatgtgccctacattattactagctatagtcacaatgctgtgcaatgcatcactaaaacttacttctcctttttttttttttttttttgagacagagtttcactctgttgcccaggcaggagtgcagtggcacaatctcagctcactgcaacctccacctcccaggttcaagcgattcttgtgcctcagcctcccaagtagctgggactacaggtgcacgccaccacacccagctaatttttgtatttttagtagagatggggtttcaccatgttggccagactggtctcaaactcctgatctcaaatgatccacctgccttggcctcttctcctatctattaataatggaaattgtacatcctttgaccaacatctttccttcccccctcttctccaccagactctgtctctgctttttctacctgcttcaatgtgaatatctttctcagttgttcagtatgcaggagtctttcacctagtttctgctttctctcagggagtattgatccatatgtaggtgttcattaggtgcatctgtcagaaaagggatagtcaggaccctcctattccaccatgttgctgatgtaacatcacctcttgatttgaatcctccctagtgaacaatcacctagctctcattggtaacagcaacttctccccttagcaaagcagacttcatagcagggagcactgaggctcaaagaagcagcagcatttgctgataaacaggtgctggagaatattcagagcagcaagagcagaggtgtggatgtgggacctcctgagacccataacatggacccagagtaaatcgttcaatgggatggagcataaggtggtgaaacagaaaggtgagaggcagatttaaatgatgtatatccttgtcactgttcttcaaaactaacttccaattaatatgctgtatggtaaacatatctgagagcaataacgtagactccctgagactgaccctgtatggcagacacatctaaatgtgtgctctgagctaggaaatctgacagcgccaaacacatagatttgttccttttctatgaggaacatctgagctccgagcctggcccatggaacacaggccatactgggaatcaaggccctttgttttggggtaagtgaaagttgccagttgaagactgtcggagggtgctaaaagaaaatgtgatgtaagctgcatgccttttgcaagcagttgcagttataatgctcagcctgcccccactaggccatgcagttctcctgtctagcctgctaccactggactctctcccctgcacgtaagtccccagtaaaacccatgtctcatttgctggctctgggtctcttcttcagcctcttgcatctagtaccacacccactggagtcgatacggattcgacacaacacatgcatacagagatttaagtcccaccatgtataattctatcttatagcagtttcaagaagtctgtaccccaggagcattgaagggggatcaaatcttactaatcgtaggaaatagcttcatctaaagaagaatttcccaattgttggagcttttcttaaaaggcatgggctgctgacaaagtaatgtgctccctgttgctcaatgcattcaagcaactggatgcattcaagatgggctggatgaccatctgcctggaaggtcaaagagatttttaccttagtaggaagttggtgggaggacttttaaggaggcttccaatcatgacagattgtgatcttttgggtaaagaactaagacttcacctgggtttgaaccccatctctgccccttaccagctgggtgacctgggcaaagcatttaacctcgctgtcccagcttcttccatagtgaaatggggacatgtatcagtgtctacctcatagggtgattgtgaggatgaaacgagttgttccatatcaagggtcatggacattatcaatgttgaataaatgttggtcactgttcttatgatggcgttgttattatggattgtgactccccatctttcatttaaggagatgccacttaaatgggctccacaacacaacattcctgcaagcacagaccaggcacaagatacctggtatccttctgacagctcttttttttcctgtatcaaaatgaagcataagatgaatgggaaaaagatgagacacagactttaaaaatcaatatccttataactattcttcaaatataatcaccaattatattaattatattaatacttatacagaagtgtaagtctcatctatcttattagatagaattccaatgtgaatccaccttcaaccctttgaacagcacttctggtgagggagggtggaaattcacacaggggacccttcctgcgtttccaccctggctcccagatgccgcatttttcagagaagtttgccttgaacttccatgcacctcctcctaccccctgcaaatttacacacagagcacctttgtgagccgaagactgggcacggacagagcacagagagggcttgtcaaagtaaacgagttgattcatgtgtaaaaatcccccgactgcgtttacagattaaattggaaaaactttcagctgcttttggttgaaaattccactcaaatatttcattggatgcctgtgccttcggcacatggagttccagtgcttgcacaatagtctgcacgtgcaaacacaaagctcggtggtctgtgagtggcatgtggcttcaaaaggtctgtgtcatctgatggccaatggtttcctgcatatttgctgtataagcacatccctgtccacggatgtgctgaattaatgataagcccacaaagtttaacaaggttcaggtggagggctctcgaatttttgaacttcacagcactagatgcttgaatgaatctagcaacagtaaattcattactttgttggcagcttgtgcctcttaataaagagctccactgattaggaagagacagctgtagatctgcattgttccatgtaacagccaccaaccactgtggcctttgaacatttaaaatgtggctaatccaaaccaagatgtgctgtacaggacctgaactcagctctgggtcaagcagacccgacaggtatgtacagaactctccacccaaaacaacagaatatacattcttctcattgccacatggcacttactctaaaattgatcacataatcagaagtaaaacactcctcagcaaatgcaaacagaactaaaatcataatagtctctcagatcacagtgcaatcaaattagaactcaagatgaagaaattcactcaaaaccacataactacatggaaactgaacaacctgctcctgaatgactcctgggtaaataatcaaagtaaggcagaaatcaagaagttcttgaaaaccagcacaagacaagttctggccagggcaatcaggcaaaagaaagaaataagaagtattaaaatagaaaaagaagaagtcaaattatctttgtttgcagatgacatgatcttatatctagaaaaccccattacctcagcccaaaagcttcttaagctgataagcaacctcagcaaagtttcaggatacaaaatcaatatgcaaaaatcactagcattcttatacatcaacaacaggcaaacagagagccaaatcaggaatgaactcctattcacaattgctacgaatagaataaaatacctaagaatacagctaacaagggaagtgaaccacctcttcaaagacaactacaaaccactgctcaaggaaatcagagaggacacaaacaaatggaaaaacattccatgctcatggataggaagaatcaagattgtgaaaatggccatactgcccaaagtaattcaatgctagtcccattaaactaccactgacattctctgcagaattagaagaaactattttaaaattcagatgaaaccaaaaaagagcctgaatagccaagacaattctaagcaaaaacaacaaagctgaaggcatcatgctacccaacttcaaattatactacagtaaccaaaacagtatagtactggtagaaacacagacacatagaccaatggaacagaactgagaactcagaaataagattgcacacctacaaccatctgcccttcaacaaacctgacagaaacaagcaatggggaaaggattccgtttaataaacggtgctgggagaactggctagccatctgcagaaagttgaaactggactccttctttacaccacatacaaaaattaactcaagatagattaaagacttcaatgtaaaacgccaaactatggaaaaaccctagaagaaaatctagtcaataccattcaggacataggcatgggcaaaaatttcatgatgaaaatgccaaaaacaattgcaccaaagcaaaaattgtcaaatgggatctaattaaactaaagagcttctgcacagcaaaacaaactatcatcagtgtaaacagaaaacctacagaatgggagaaccattttgcaatccatccctctgacaaaagtctaatatccatggtctacaaggaacttaaacaaatttacaagaaaaaaatactaaaaagtgggcaaaggacatgaacagacacttctccggagaagacatacatgtggccaaaaagtgtatgaaaaaaggctcaacatcactgatcaacagagaaatgcaaatcaaaaccacaatgagataccatctcataccagtcagaatggtgattattaaaaagtctaaaaacaacagatgctggtgaggttgtggagaaataggaatgctttcacactattggtgcgaatgcaaattagttcaaccattgtggaagacagtgtggcgattcctcaaagatctggaggcagaaataccattggacccagcagtctcattactgagtatatacccaaaggaatagaaatcattctattttaaaaatacacacaaatatatgttcactgtggcactattcacaatagcaagacatggaaccaacccaaatgcccatcaatgataaactggatatagaaaatgtggtacatatacaccatgtatataataatgataaactggataaagtaatgataaactggataaagtaatgataaactggataaagaaaatgtggtacatatacaccatggaatatactatgcagtatatatatactatgcggtatatatatatatcataaaaaggatcatgccctttgaagggacatggatggagctggaagccataattctaagtgaagtaatgcaggaacagaaaacaaaacactgtaagttcccacttattattgtgagctgaatgatgagaacccataaacacatggtggggaacaacacacactggagcctgttgggggtagggggagggagaacatcaggaagaatggctcagaataaacaaataaataaattagatgtgttgtaaaatacacaccaaatttcaaagacttagtaccccaaaaaagtcaactaactcattaataactttttatagtgattatatgttaaaatttggctacaacggattaaaacatattactaaactttttttttacctttatcatagggctactagaaaaatttaaattacccatatagctcacattatattttaattatataatcttaacccagagtattcatgaaaacgagaatctcatagaggtagcacaggaatctgcatggttaacaagcatccaagtgattaaggtcactgctatttgaaaacccctgactcagcagtgacctgaagcacgagtcaggacacttggattctaaacatcattcagttctttttcttacctgggactccatctcctcatcaatagcatgaagggcttggattagacctggaaagttgtctgatttaaggcttccgattccattatccactgattgtccatcaacccataaacctaggccagcagatgtccccagagactgaatgtacccagatggataccagattcaggcaggtgtgaccttagggaggctttcctggtttttcacatcctccggaggactctgaaagaatggtcacctgggggcttcccagaggagtacagctaactccaggggaaccacatggaacgttgtctgcatcaacatccttatcgcgaccaactgcccaaggactgccatgtacagcacagcctctcgatatgtcccagagcagactcacactcttaggctgccctaaaaatggccaagattccatggatcaaacagcagaagaatgcagcccgtcccaaggaaggttactcgactcaagctaccaacctattcagccagaagaattccttttcagaagcagattgggaaaccaattttttttcccctatggaaccatcaatttcacctttccaagatgactctgacgaaagttgctaacccactcttcagaacctttgaaattcatctttctaattgaagggaggttttccagtggggaaaaaatggctcattcgaaataagaataaatgtgttcggcgtcggcgtcgctccgcgcgggggctccaggccgaagtctcgccgcgggctgcgagtcaaatgccggtggttaagggcgctcgagaggcctctacccgtttggcgttggctctggcgtctgggtcgttgtgtcctgacaaccgctcaggtaaccgtttcctagacagcgggtgcggctactttagccctgagcgtgctctgcggctgcctgcgggtctcagctagtgtccgacccctctcttcgcggactccacgccgagcagccaccctgagccaagagccggaagtcccggcattggcggcctggacagcctcgcaccggccaatcaaggagaacctcaagaacaacttcctctatgacttcctctacggcggtgtcggcctaacagctccacgggagtgtggacgaggagctgagcaaaaaaattccagaagtgagatgaaatgaacatcctggcgacatatcatccagcagacaaagactatggtttatgaaaatagatgaaccaagcacttcttcccatcgtattataggtgatgatgaagatgtatgtagtgatacagagaccactgaaaccatggaacgagatatcttagctaagaaattcgctgctgcttgaaggctcggagccaaagtatagggttcaggaataagatagcagcagagaggaggatagtgacctctcacctgaagaacaagaaaaaaagcgacaatttgaaatgaaaaggaagtttcactacaatgaaggactcaatatcatcaaactagctagacaatttcaaaagacctaaatgatgacgaagatgaagaaatgttagagactgtagatggagaaagcatgaatacggaaaaatcaaatcaaggatctactgcaagtgaccaacagcaaaagaaatcacgaagttcatagaagagatttgttcaacgctgcaattgttagatataaaccctgttactataatgcattgcttcttgttctccacaattcatgactgaagtaccaaaatgcataccagttattatatattgccaagaattaaatgataaccttatagagactgataatgcctaaaatatattcttgtgcatagtactttaccacaaatacagtgtaatatcatcagtccaaaactgcattacttttgtaaaaaacactggttaatttgtataagatatcatataactttttatgctttagaggttaaacaatgtctttgggggggaacatttattgtcatcactctaaatgtggtggtagctcttataaagtttgttgttgttttaatcaaaagccaactgaacagcatataaagactgataaatattcaggctgagtagtattttaacgcttgtcttcaacttgatttgtctgtttaattgaaaagggttgtaagagttaccgttgcattttctggcctactacctttaaaattcctgttgtgtttctttgtatttacaaggaaaggtctgaactttttcttgtcaaaactagcttttttccgacaaataaattatcaggttaaacttgcactaatgtctcctctgttttttgttttggttttttctattttatgtttttggtacactgggcagacttcagagcagctttttttcaataaatattctaatgtagctatctcagcattccctttaaatacctgtcttaacctcctgcttttatttcttacccctttcctcacataggcacacaatcctttaccttttaaaggatcattaagattgtcacaacgttaggaactctttctctcactcttctgtcatttgctgcaatattgaaattcttattttgaccatcaatgcctatgaattcttctaatacacgaagcaaatagattaagtagcagcagtactataggcaggaaatacagtttaactgctgaatttctatacctctctcatttacagcttgctaattaaattgttattatcagtttttttggcttaattagacttaagaaaacaattaactgagggtttttttgttttttgggtttttttttttttttgcatgaggagagaattgtgtgtaaccagtgatatgattattactgaaagtacagacaaaagtaagcctggacattgtttaatttaaatactttaaatagtccctgctttaagggaatacgataatatatactatgacaaatgtactttattcttctaacacagtaagaattacttggaattttttcctgaaatgaagtgcaggaaagccctgtgcatcttgggttagtgatggtttcatttctagccaattatttgtatcttaagtttttgttagtaccaaaataatctgttatatgaacagacttttaaaataatttctgtatattatatatataagaaagcttttattgaacagcttatcttccacttgcaagtttatggaaatatcagtatgtcaaaataaataaaaagtgggagaattatttggtattagaagaatgttttaattattttgatttttttaatgggatataatcaaagtactgctgaactataggtgcagtattctactaaacatttcagctagtaataccactgatttagaaacaaaactgcttatctctgccttctgaatttagaatgttgagattacctgtttaaatctgttttgggggatgtagacattaagtctgtacatacatgtgtacatatattcatgcaccttctgattttggttttcttgtttttgagttcttagaaagtattcacatactcttttttttggtagaagtagctgttgtacaatgaagaaaaggataagactttaaacagttgattctgtttgtgttttctccaaattattttttgaaatttaccttacaagcaaactcattttctggttttcagaaatagatgattatttcagagcagtaagacatgacaaacagcatgcccaggaggattttaggtagtcaaattcagctgagaaaaaggtgttttcaagtcataagttgctcattgatatggtatgaactagtcaaaatatgaaccattataattcaagttagattttcttctggagagacagatttgaatgttcagttctagccacagtagattttactttcaactttttaatcaatatcactttctgtgcttaactccttggtgttgccttgtccgttttcattaatcaaattctgcagggatgactaaaatttgacataatggtataaatggattgttaagaataactttaagttgaagattaaagcaagatgccattttccccatgacttcgattttgtttacattttttcctttaagttagtatacactacacatacataaaatacaataatatgacaacaaaaggaataaatgttcttattttatagaataataaaatgtctgatattgggatatgactggtggtgttatattcataattgttgtaataaaattagtaactcctaaaattaatggaatacctgcgaagcgtaatgagaaaattgtaagaggctcctgcgtgtgctaaatttccaactaaagctgcttatcctgtcccagctccagcttctactagtaaaggggcaagcagaagtcaaaacgatggtgaaaaaagtcagaagcttatattgtttataagagaatgctgtatctcggctcagtcatttagggagctaatcagttaccaagtcctcttattttaattggcatatccattaaaagattattacaaatgcatgggcagttataatgacataaatttgatcattgcctaatagggctcctggttgacccagtttggctcatattaagagatttatgtcagttcctactactctggctcaagcaccgaatactataatgtgccaatatctttgtgtttgttgaaaataatcaatgattaatcaatataggtagaagagtgaaatggctgaggaagccttaatccgtaatctaaagacagaggttgaaccctctttttactgtgcctcaaggtgaatagtcacatcaaattgcaaactcaaagatgcagcttcaattctgccagggcttcccctgcccttttctctcaacagcagaagtagactgaagacaggtgattagggtatttcactgttaatgaaattttcttgaggttggatactaccaatctaatgaggatttagtttaattaaaatgtttgatttgcattcaattgatgtaagatagagagtgttgcagtccttaatttttcaggaataaaatataaaatattgcttagggctttgaaggcttttggtctgcctaacctaaattcctaatccaatgttgagaatactggtttaagtgggaagaaaaaggctgataacaaaataagcgagggaaggaagaatgtttattttatattttcaaattgtcattttgtttttatgttattggttttggggaacgtctttaatgatgtagaatagattaatcccatacaaaaacataagttgagtagggctttgatggtgataaatgttagtataataacgctgttattttttgttaattcttggctaataagtcatttggtaaaaatcgtgtaagaggaggtaggtcttttggagataatagaaatataaagatatgggagttattagtgataacttaccccatgtatgtaataatgataatgtatgggagttatatttaaattgaataaatatgaatacagtgattattaatattttgtaattagtagatgtaacattattgtagaaaggttgtaggttagagtggacattatttagtctatatgtgcaattaataggccagaattttgtatagttatgcctgatttagtcttcctcattctcctatcagaattgataatatagcagtaattaatattacatttgggttaattgatgatacttggaattgagattagtgccagtttttgtcatattaataagattatgcctgatgttattggaattccttgtcttacttctgggactcagaaatggaatggagaaagcccactttttataattactgttatagtgattattacagatgctattgggttgggaatttttatgattgttcactacccagaatatgatatatcaagacacctactattaggactgtagatgcagttgtgttaagaaatatttagtagctgcttctttggatcatgaatttaattttttattaaaatgagaataatggctagtacatttatttctagtcctattcagattattaatcagtgcaagctaaatattgtaagtatagttcctgtaaatttctggctcacggttcacatcactctctgttatatagtatacagagacatacgtattatatatatatgatatctttctaaaaataaccaatgaaattgctttagtaagcattgccatgtcatttttggagggagaaagatagggagcaaagaaggaaatgggtaagatgggccccaatctaaacctcaggtgtgcttcccacaaaaggttccagagagtctctggattccccacaaccagagagcaacagcaggtggagttagattggagatgaaagcatttcagataaatgtttgttgactcacatgtaaggagaaaatttaccaggctgcctaagaggaaaagatcttggcccaaaccttttccttaatcaatggaagaatccccattttcccccactacaaagaaaggagcaaagagccagccacgaggtggtcaatctgcaccagctcagacatgagtgcaaggacattctatggcctggaatcttcaacgcacatgaaaagggctttttctatccataaatggtaatgatctacaacaatagggctgtgacactggaagataccaattcctacatcttgctttgctgaggacactcacggttttagcctcagaccttcctagattacattttagctttagttcatattctcatatttgtcctaaatgtcagcctctgatcaagctcattaaacagaggctggcccttcccacagggggcttattatctcagccagacaattcttgccagtaggcaagaggaagaagacaagcaaacttataagagttgtaaagaatggaactgggacccaaattatgagctaaggccttgagtaaacatatacagaggttccaggtaaatggtgattctgtttacagtggaacagggccttcttatccaggatttctcctcctagctgatctgattagcagctccttattcatatctcctgctccaaagttttccattgccacatatacaggtaatggtattttgcacaagaagataagcatgattcaatagaggtaggagggtctggtaatcagctacaacatcaattgcaatatatgatcactagtaacattcccaacaggtgtggccccacctcttcctctgcatggaaaacaattaatggtatcttttttgctatccttggattgtgactaaagtatgaggtgctttcatcataattagaggtgctgtgtcaccaggatctatgttaatgagcaaccagaacttcctggaagataatagcccaagaagcaacccactgtcatcagtgaagaagtgactctgggaagacgttggtgcttggttggtttcctgagcccggcccagcccaatctgcaatatgtagagaccgcaactgaaaagggaggttgttttcactaacaatatccaaggcactgaggaaggggtggctctgcttcagtgacctttcatgaagtacacaccaggtgaaaagaggaatttgctccacaaaaaactacacagctgtggctcctaagggctccaagtatcatcagcacaagcagaggagatggcgcccagggcagcagcagagtggcctggagggcaggtgtcgctcaccccaggggtggcagatggtctcaggtagacctggatgacaacggaggagtctctgctggcaccttcccaggcatcaaggaaataaaatggcagctgccacacggtaactaagccctggaaccatttaggagaaaggtttctgagggccaatgtcccaaagcagctagaaaaataaggtcatcaatactagtgtgaacctcttttaagccccatgagttgtaagatcttaaccacagtctacaacttcaaactttttctaggatgtaaaaattgtggcctggtggcacggtggctcacgcctgtcatcccaacactttgggaggctgatgtgggtggatcacaaggtcaggaaatcgagaccatcctggccaaaatggggaaacctcgtctctactaaaacacaaaaaattagttgagtgtggtggcacacgcctgtaatcccagctacttggaggctgaggcaggggaatcacttgaacctgggagacagagattgcagtgagccaagatcatgccactgtactccagccgggcaacagagcaagactccgtctcaaaaaaaaaaaaaaaaattgcagacacactgaaagcttgtgggttcctccaacgggcagctcagagattccttcttctctgatctctcttcagaatcaggtttcaccagcttaacctgagacttaaaggtgctgaaaaatgaaggtttcaggtgaataaatgggactgcagaacagagattggcagctatcattataacctagtgccaaaggggttagacccatgggttccacctgtctggtgaataatcaccttcactaagaagatggtcatctaccagttatgacctgacatcctactcaatgccttcgagtaggagagtataaagagtataaagaggactagctatcacttctcagcttttggctaagaacaagtgaagggcaccggctttggaattgtaaagatatgaattcaaatcccagttcttctatttgctcatagtatgaattttaacaaattaggtgacctctctgcttcttggatgcctcagctatcacacagaatatatctaatgggatattttgcaggactatttttcagcgttaaattaaacatgtcaagcttctaacagaatgcctgacatatagtagttgccttaaaaaaaaaaaaaaaaaagtagctactgctattaactagccaactttcaacagctccccttatacataaagtgggcatgaaagcaaattagagctggatcctactaatggggggccaggaacagtaaatgtgtttggaaagccataggatttgagagagaaaatctcacagatggcatgatccaattctatcattttttagttatagaacagaagctaagtgtcaaaattaggccatgcggtcaatgagagacagaacagaacacaaatccatgcttggctatggttatgggttgaattgtatgttccagaataagatatgttggagtcctacccccagaagctccaaatggccttacttagtaggatctttacagaggtcatcaagtgaaaaggaggtccttcgtatcattctcatgcctttgcattctcatagcttagttcccacttatgaatgagaacatgcgatgtttggttttccattcccctgggggaaagggtgggagggggttgagggataaaggactacaaatttagttcagtgtatactgctcaggtgatgggctcaccaaaatctcacaagtcacccccaaagaacttactcttgaaactacataccaccatttccccaaaaacctatggaaataaaaaaataacaaataaataaaaggaggtgctcaggaagggctctaatccaatatgcctggtgtctttatcaaaaggggaaatttggacacagagacatgcacacagggaggacaccctgtgaagactggagttacactgccacagtcaaggaattccagcaggtagaagagaggtctggagtggatcttcccctggcaccttcacaggggacctggtcctgcagacaccttgatctcagactgctggcctccagaagtctgagctaatacatttctgtggtttagccactctggttttggtattttgtttaggcagccttaacaaactaaaataactacttcccagtccactaagccaccataccagtagttttccaattctgttccgttggcccctagggtcccgggtagatgtttaataagtggctctcaggagagggtgtgggagacctgatgtgcagttgctgccaatttccatggtgtaaacactccccctatggccaatttcaagctcccagtgtgtggtcactgaatgcagagctgggaattgctgcacacagtcactctcatgaccaggaggagacaccaggaggtacctcagggatggcatggggtaaggggaggaccaaagaagcaggacgccagcattgccaccagcccaaactaagcactgtatgtatgagagcaacacaactgaaactgtaagctccactgcagtagcccatgaccatcaaagcaacaaacccacttccttttcaacctgaagttttttgtatctgttacatgcctagacctctggaaccccaggccactgtctgtaaagatccagcagttttagaggtcactcaggggcgcttagtggaggtcacccttctcatccctggcctctgtttcttgctcattaaagatcgtgctgcttttcactcacctagagatgaatttcaaaaagaatgtctttctttcacattcggcaggagatcaaattccccctcctctctcaaaaaacactctttaggaaaagaattccagaagaatctacccacagattctgagtccttaatctagctatccaatgtgacacagaactcagacactgtgagaaggttttgcttttactgggcctgttctccaggtctgtgctttctaattataaagttgatgtctcagtccttctttgatcagttcaactaagaggacttggtgtttatggcaattgaattgcttctttgtcacgatgtcagattcgtcccaccgttcaactacctctaacacacgaattgtatcaactaagcgcatcaaacagtaatggtgaaagggagagggactagtgcagtggctctcaactgggggcagtttttccccccaggagacgtttggtggtgtttggacacatttttgatggtcacagccagagaaagggatgctactggcatctggtacgtagaggccagggttgctgctacctattgtacaaggcatagagcagccccacaagataaagaattatctagtctaactatcaatagtgagaggttgaaaaaccctaaattcatgaaatggggagcccagaacacattgactgggatagatttggtcattgtcctatcaccgtactaaggtgctggccagtaagacggtctaaagatagaggcatatcttatacatatgacacacgaagaagaacctctatacaactaaattattttcaataataattatgtaataataagcaacaaccattattttctttaattttgcagcaatttaaaaagttaaaaatacatttctattttaaaaattttattcaaattcaagaaaatacttaatgtatgaactaaactttgcacttaccaaacaaaaacattttaccttgcagctctcattgttttattttaaaattcatgttaatcaatggggaaaagattccctatttaataaatggtgctgggagaattggctagccatatgcagaaaattgaaactggatcccttccttacaccttatacacaagttaactcaagatggattaaagacttaaatgtaaaacccaaaactataaaaaccctagaagaaaatctaggcaataccattcaggacataggcatgggcaaagatttttataatgaaattgccaaaagcaattgcgacaaaagccaaaagccgccccgtccgggagggaggtgggggggtcagccccccgcccggccagctgccccatccgggaggtgaggggcgcctctgcccggccgcccctactgggaagtgaggagcccctctgcccggccagccgccccatccgggagggaggtgggggggtcagccccccacccggccagccgccccgtccgggaggtgaggggcgcctctgcccggctgcccctactgggaagtgaggagcccctctgcctggccagccgcccagtccgggagggaggtgggggggtcagccccccgcccggccagccgccccgtccgggaggtgaggggcgcctctgcccggctgcccctactgggaagtgaggagcccctctgcccggccaccaccccgtctgggaggtgtacccaacagctcattgagaacgggccatgatgacaatggcggttttgtggaatcgaaagaggggaaaggtggggaaaagattgagaaatcggatggttgctgtgtctgtgtagaaagaagtagacatgggagactttttattttgttctgtactaagaaaaattcttctgccttgggatcctgttgatctgtgaccttacccccaaccctgtgctctctgaaacatgtgctgtgtccactcagggttaaatggattaagggcggtgcaagatgtgctttgttaaacagatgcttgaaggcagcatgctcgttaagagtcatcaccactccctaatcttaagtacccagggacacaaacactgcggaaggccgcagggtcctctgcctaggaaaaccagagacctttgttcacttgtttatctgctgaccttcccttcactattgtcctatgaccctgccaaatccccctctgcaagaaacacccaaaaatgatcaataaaaaaataaataaaataaaaaaaaaaattgacaaatgtggtctaattaaactaaaaagcttctgcacagtaaatgaaactatcatcagagtgaacagaaaacctacagaacagaagaaaatttttgcaatctatccatctgacaaaggtctaatatccagaatctacaagaaacttaagaaaattaacaagaaaaaaaaccattaaaaagtagacaaatgatatggacagacacttctcaaaaaaaaaaaaaaagacagacatgaggccaacaaacatatgaaaaatagctcaacatcactgatcattagagaaatacaaatcaaaaccacaatgagatgccatctcacaccagtcagaatggcgattattagaaagtcaagaaacaaaagatgctggtgagattgtggagaaataggaatgcttttacactgttggtgggaatgtaaattagaatcaactattgtggaagacagtgtggtgattcctcaaagatctggaggcagaaataccactggacccagcaatctcctcactgggtatatacccaaaggaatgtaaatcattctattataaagatacatgtacatgccgggtgcggttgctcacgcctgtaatcccagcactttgggaggccgaggcaggcagatcacgaggtcaggagatcgagacaatcctggctaacacggtgaaaccccatctctactgaaaatacaaaaaattagccaggcttggtggcggatgcctgtagtcccagctacttgggaggctgaggcaggagaatggcgtgaacccgggaagcggagcttgcagtgagccgagatcgcaccactgctctccagcctgggtgacaaagtgagactctgtcttaaaaaataaataaataaataaagatacatgcacatgtatgttcattgcagcactattcacaagagcaaagacatggaatcaacccaaatgcccatcaatgatagactggataaagaaaatgtgatacatatacaccacggaatactatgcagacacaaaaaggaatgagatcatgtcctttgcagggatacagttaaagctggaagccattatcctcagcaaactaatgcaggaacagaaaaccaaacaccacatgttctcacttataagtgggagctgaacaatatggacacaggaaggggaacaacacacattagggcctgtcaggggagagttgggaggggagagcattagggaaaagagctaatgcatgctgagcttaatacctaggtgataggttgataggtgcagcacaccaccatggcacatctttacctatgtaacaaacctgcacatcctgcacatgtaccctagaactttaaaaatatatattatttaaaaatgaaataagataaaattcatgttaaattttaaacacaaaaactccaaatgttcacacagaataacagaattagagtaactcgagtcttgtttcttcatctttacaatcactgtgctaatgttgtttgtttgcaatccacagtttaaaggcaggaatgtatactactataggtttggaggcacaaactaaaccccaagtgagctcaaatggttctaaatatttttgaacttcatttcaaaaagaacactgagtccacagattgaggggcagggagtgaactccctgtataaccaaattgtaattgtaacttccatgtgaaatagagcttatctatgagccttggagtaaaataccaccatgttctctatgttctagtggtcacccaggccagctgcttcgacgtggataggggctacacaggacatgaatatcatgagaaggtgaggatcactgaggaccatcttggaggctggctaccacatttaaatttcaagatggtcttcagtttggaattcactgttggtcattagtttgcttagtggagacctactatgcgataccaagtgaaatctttgtttctctgctttaatggagggcatagataatgcaccaagaggactttcttattacagcattggatattttcaatgccttgttcatattcctgttgcttcactcatggccagccctgttctcacaagaggcaagctgagctgccaagctagccaagcacggttattatgaacaatatattacgaccatcttggacagctccaattagcaagaaatatgagtagtaactggttctgaattggagcaaacacttagagggaagcattattttgataaatgatcaagatctttcaaacctcaaattcactgcctgaaataactcagtaccacgttatgccacgtctgttccagttcagtcactcattcactcatttcacctttctccctttgcatgcagcatttagaagctcacaaatactcactgaataaacaatactaacaacaagtaaaggcttgtaataatttgacagtttcattctaaatttagcatagaaaaaaacattaaatactaaaacatccacttaaaaattatataagctcaaaattatatatcactgtcataaatgttgatgaagattaaataacatgaggaaacaactgtaacaaagcagaaaataaaaattgttttgacagtatttttcaaactgaaaaaagcagggagccctcttagcatagctggcagcatgtcaatctcacaaactggaaaaagcagctattatagaaaatatattctggataaatatataataaatttacatattagttgtgttttaatgttagaatgaaattgatacatattcctttttctacttttttgaatttctattttctcataaagttttcagcagtacaattttatggggcatgatctttagttaacaatgtactattatgtaatgcaagaagtaaaatagcctagtagaaaagcatagtagaaagaatgctggcctaatgagaaatcctgggaataagcacctgccattgctaatgagcaggatgacacctcttcacttctcaacctctttatctgtgaaagataagaacaggaaatactactcactttatgccagcgaaatacaaaaatttattaggagtagatctcatgttttcttactacaaaaacaaacaaacaaacaaagagacaccaggaaccttgggaggtgtgggatatgtctattaatatgtctattaccttaattgtggtgatgaaatcatggtgtttgcatatgtccaaactcatcaaattgtttatattaaacgagtatggtttttgcatatcaatatacctcaataaaactgttttttaaaaggtatgagacagatttcagtgtttcagagttgctacctttgtaaaaagcaagctaagaaaaatataattccaaacacattgacttcttttattgtttagctgaagagattatagcctgatcacttctgtttaaagataaatgttttaagctgataaacaacatcagcaaagtctcaggtacaaaatcaatgtgcaaaaatcacaaatattcctatacaccaataatagacaaacagagagccaaatcatgagtgaactcccattcaaaattgctgcaaagagaataaaatacttaggaatacaacttacaagggatgtgaaggacctcttcaaggagaactacaaatcactgctcaaggaaataagagaggacacaaacaaatggaaaaacattccacgctcatggatagaaagaatcaatatcgtgaaaatggccataccgcccaaagtaatttatagattcaatgctatccccatcaagctatcattgacttgcttcacagaattggaaaaaaactgctttaaatttcatatggaaccaaaaaagagcccatatagccaagacaatcctaagcaaaaagaacaaagctggaggcatcatgctacctgacgtcaaactatactacaaggttacagcaaccaaaacagcatggtactggtaccaaaacagatacctagaccaatggaacagaacagagaccacagaaaaaatgctacacatctacaaccaactgatctttgacaaacctgacaaaaacaagcagtggggaaaggattccctgtttaataaatggtgttgggaaaactggctagccatatgcagcaaactgacactggaccccttccttacacctcatacaaaaattaactcaagatggattaaagacttaaatgtaagacctaaaaccataaaaaccctagaagaaaatctaggcaataccattcaggacataggcatgggcaaagacttcatgactaaaacaccaaaagcaatggcaacaaaagccaaaattgacaatgggatctaattaaactaaagagcttctgcacagcaaaagaaactattatcagagtgaacaggcaacttacagaatgggagaaaatttttgcaatctatccatctgacaaagggctaatatccagaatctacaaggatatttaaataagtttacaagaaaaaaacaaaccaccccatcaaaaaatggtgaaggatatgaacagacacttctcaaaggaagatatctatgcggccaacaaacataagaaaaaaagttcatcatcacttgtcattagagaaatgcaaatcaaaaccacaatgagatgccatctcacgccagttagactggtgatcattaaaaagtcaggaaacaacagatgctggagagcatgtgaagaaacaggaatgctttcacactgctggtgggagtgtaaattagttcaacctttgtggaagacagtgtggtgattcctcaaggatctagaagcagaaatatcatttgacccagcaatcccattactgggtatatacccaaaggattataaatcattctactataaagacacatgcacacgtatgtttactgcagcactattcacaatagcaaagacttggaaccaacccaaatggccatcaatgatagactggataaagaaaatgtggcacatatacaccatagaatactatgcagccataaaaaaagaatgagttgatgtcctttgcagggacatggatgaagctggaaaccaccattctcagcaaactaacgcaggaacagaaaaccaaacaccacatgttctcactcataagtgggaggtgaacaatgagaacacatggacacagggaggggaacatcacacaccagggcctgttgaggggtggaggaataggagagggatagcattaggagaaatacctaatgtagatgacgggttgatgggtgcagcaaaccaccatggcccatgtatacctatgtaacaaacctgcaagttctgcacatgtatctcagaacttaaggtataataaaaaatatatatatatataaatgttttatttaagagtatcattctgaccatcatgcctcccaccatgcctacactagctctgtcatatcttggtttgttaatgcatcagacacctcaggtgatagcccatcacagtcacctacagctcaggacccaggggtgaacaccaaaatgggcaccagaatgtgtagagaaagctccagaagaagcaggaacccatgtctcttcccatttgatctattcttgttgtgtgtgtgtgtgttcatgtatgtgcaagtgtctatgtgtgtgtttctcccaagttacctcaagaaaacttgatcaccaacgactccagcaggctggacttcttgctacagagaaacaactctggtgagtaggttttctttgttttcctacaaggaaagactaacgatggcagggttcaggaatgtatcaatataggatgtcgttgtttaaaaaaggaaaaagagtcgaaggttctctgtttcagggaatggaggaataacaagatgaaagcaataggaaaaatgaactggcacgaaagagttggctccaggaacttctcctatgcctcttcaactctaaaatcagaaaggtaaaactggagagccactggagcatggagggtaggtttccgagctgcacacttagagctgcacatgagttccccaaaagagtaaaggtggaggccttagaagacacggtgaggactccaggaggggaagaagaggacgaacactcaggaacaaaagcagcaaaggcagtcatagttacagatgccaaagaggaaaaaaggagaacaaattcccatcaaagcaggagggtgttttgagaaagaatgggtggtcaactgcgctaaatgttggaaagagattatgaggaaggcaagaggacagagacacaaagctttttcagtaaggtagccactggtgtctttgggtggcatatttgtaatagaatggtggggacaatcaccaataattacacctcgcattacctcaccagtaagcagaggccgcacatgaggagacagaccagcaaaactaggacagagaaagcatatagtaggaagattgaacacaaccaagtgtgagatttgggcataggaaatgtatagataatggctgggtaacggcaataggatggaagagatgcaaaagggcccaacctagaacatgaaggacccactggggtggggatagggtggaccagccttgaaatcatttcagcaagcagagcccaatgtgcaaaggggtgcaaagcagagcccgatgttgcaactaaccagcagtcacccaggcaggcagacagcatggggcaggggagagaggagaacgcctttgcatcatggtgaaccgtgatgtttttcaacaagtaaactgaatcaggaacaggaagaaatccggaacaagaaatattctaggaagtcagctgaaaggcagccaagctgcattagagaatcagtggcgataaccgggctcccatcaacagactgtgtggttcaggggcaagactccagcccccggggagagctggcaagggcaagaagaaagggctggatccatggaggagtggaggagcaggctcccaaagacagatcagtggcttgagactttgtgagccagtgagcagacctgggtgcaaagcaggactgaaagggccaaaagagtgagtcattgcagcccagagcactgggccagaactcctcagccccttccacgagcagggcagagacggcctgggcagtagcatgtttggctcaaagactcccagcagaagaggacggcaaaggctgagaatcaggcaggagtcaaagaaggggtgctttaaggtaaggggaaggcttaaacagaaaaagcagaaggaagggtaagaaagagttcagagacagggtcataagcattttgtaaggctaaggccaaggaagaagtgggaaggcataaaatacccagcgaatacttggccttgctctcctcagatctaaccagttgcagacctagagctactctagaataattgttaattgaatgtgatgcaccctgaaaggcacccaatcagaagatttgagattgatctgctgtgtgagggccaaggaagaatttctcgattgcgaggactgacaaacacccacgcaagtccctacaagaggttatgaacattttcttctttcgaaattactttttcgccgtgcagattttcatactctgagatacttggtgagtatggttctaaccgaaggcaaagcaacaagttcaataaccccacagggaactcagcagccccgctccttgtcttccaaagctgtccagctcctcctcccagtggctggttttcagttttgcaactcttgaaattcagattgataacttgggcacccttttagtggagatggctgaaaaagtagatttcttcttagccaaacaaaggcttcaaaagcatctcttacaattttaagcttttcaaatggcttcaaaattcacaagtacccataacaactttttaaaactttgtgactttagatcgacacccagaaaattgtacgctgggttttcccttaaggagagaacattttggatttgcttttgttagtttcaaatgaatgacctcatcattggattaatacctaaaccaaaaggatgaatggcttgtgctacttcagctggggagtccaggaacctggaggatgctgcggagccattcagagggatcttggcatgtagcatgttctcaaaactttgaagcagcaatgacaatgagaagaaggaggaggcagaggaagcagtagaggctctaatgaaattcattgcctgaatattaaaagcattcaataatgggctcaaatcaatccattgatggtgcatccaaaaacagctataaaggaaagctagggatatttgtgctatgtcatcatattttgaaggttaacactatgaataacagcctacccttctttactaaatatgttggtgccacttagaatcctgagaatcttaggggtatttttcaactgaaatgggtatttttaactagaaactcaagtggtctgtggccacaaattgagaagacctggcctagtgaaccatgttggcaaacattctgcctatgcctatgaaataatagatgctcaaggcatcatttcacatcataatagcagaaatctagttcttccagggctaaagcagaaggaggtaagggtctgatgctctgacttgagacacagccacagagagaatgattcacatgtgtgtatcttaaatcagtactcactgcccccatgcaactcttgacctgtcttctgtcaaggttaagagcactaatgaggccaggcagtggctcatgcctataatcccagcactttgggagactaaggcaggcagattacctgaagccaggagttcaagaccagcctggccaacatggtgaaaccccatctctactaaaaatacaaaaattagctgggcatggtggtgggcacctgtaatcccagctacttgggaggctgagacatgagaattgcttgaacctgggaggcggaggttgcagttagctgagatcgcaccactgcactccagcctgaggacagagtgagactccatctcaaaaaaaaaaaaaaaaaaaaaaaagcactaacaagtgacagaaaggcaggctggctgtctcctttcctaaataaaaatagatccatgtgctttggatttctcaaacacagatgtatagttagcttttaaattttttaaatgttctgaatttaagaacctgactttctctgtctgtgggagtatcaactgcagatacagaatgcactcagatctcactttggatttactcaggtcccagtaatgagctcctgtgcaatgcccagggctatgctctgaagatgcaggaagggaagatcttaaactacatgattttggaaggcaaatgtagatacccaccaatctctactacaatgctgctttatgtggtccccaagaacctctgacttgatgagtactgatgggcccccaaaataaactcggggctaatgtcgagcaggaaacaaagtgcattaacctgttgggtaaaattaattaataattatctctctcaacacgaaagaagccctgctaggaatttttatttcactaattttttggagacagaggcttactctgtcacccaggctggagtgcagtggcatgatctcagctcactgcagctcccaggttcaagtgactctcgtgccttagcctccgaagtaggtgggattacaggcacccaccaccacactcagttaatttttgtatttttagtgaagatgggttttcaccatgttggccaggctggtctcgaactcctgaccacaagtgatctgcctgcctcggcttcctaaagtgttaggattacaggcatgagccactgtgcccagtactgctaggaattatcttggctgtctttctgacattcatttgttgtgagacagaggctcacttgtccaaacccaaagaatggactcagagacctggaaaacagcaaaagcgagacttttaatgacagtcttgcaagatcgagtgtctgatgggaaggcacacccagcacagttacaacaagcagtttatcccctagtgtgcaggtccctcccccagttcctcataggctgagaactatggggtcacaatcttcccagacgtcgcctattggttgttgggttggggctttaggtggtttctttaaggttgtcttgctgcattttgttgcagcccacaatgcattacaatcctagtcagctcaggggctctttaagtatctgacttatgtcctaagtagctgggcagctcataagaacagacaaagcaagctattttgcaggctagtaaactttcatcttagactaaacttttttggattaggtgaaggcaactaagggacgggggtggggtgccaacaagcaggcatcagctatccaagcaggggcctagtatatcctgtttttttctgtagtttgctgacctaagccaatttaagtcactttgtcttagaaatggaccactatatacattatttccttcatttgtgaggaaagattattattacaaatagaaattgctaatatttattgaccactgaccttctgcactgcaccaatcttacatatattaactcacttaaattctcaacaatctagtgagggtttactattttgcatcctagataattaagggacacagaagttaaattccttgctcaaaatcttataggtgacagaacaaagattgaaacccgagcactctggatcctgggcataaactcttaaccacccctctcatttcctctgaaaaattaacagattcactcatagtgggcctacttctatttttaagtgtaaacatttttgtcctcagatattttgaccctcataagttaaccatgctaggattttcttgttttgtctttcagagcaaggacacaggctcatccaatgttttagtacactgctacctaaaatcaaagaaataagatcttatttgttctaacaaaagacctgcttcacaatagaaataaaaatggtctctttgttcatttactgaacaaacccaaaaacatatgtttttgggacaaacccaaaaacatagctcagtctagtaaacttctccaaaatatgcatgttatacatttttgagatacctcttgtgttatatatctggtgggaaaaaaaagggagctttgatcatagcacatgcatcaacaaaaaattttcactctaaacctcagtttgaatatggtttaaaagaaaattgtaaagcgtttcctctcccagtgttaaccaaatagaggttgttggaaaaacaatcctgggaactgggtgtgggtctgggccctgaaactagattgcaccagcaccaatttacatgaaggattacataaagttttggacatggtactgagcaattttgccagtttcaactgtccagcatcttaacctcatttccatatttggggacttctgacacatactacccaccatgaaagcctatcactacagcagctgaaatgccagggccctgggtagaaggttggtcacatgacctctcatggccaatcaggttccctggctgggactttgactttgggctgagagccccagctttaattttcactacatttatcatttcatctattgtgtttcctccacagacaaatgtaatgctccatgaaggcagtcaactttgttcactgctgtattcctagtgcctaaaataatgtctgactcataacaagaaaatatgtacaaatacatatttcttgaatgaataaaatatgtcttgttatctgaatcaattcttttaatttctaagatctcaaattctcttgtataatagctgattcctaatttatggatatggtagccacgcttatttccaaaacatgatatttacattaatgatcttctattagctctataagctctgatgtggttttgctgtgtcgccacccaaatgtcatcttgaattgtagctttcataatccccatgtgtcttgggagggagcctgtgggaggtaattgaatcatggggggcagtttcccccatactgttctcatgttaatgaacaagtctcacaaaatctgatagttttttaaaggggagttcatctgcacatgctctcttgcctgccaccatataagacgtgcctctgctcctccttcaccttccaccatgactgtgaggcctccctagccatgtggaactgtgagtccataaaacctgtttttctttataaattacccagtttggggtatgtctttattagcagagtgagaacagactaatataagctctgtttccttgggtattatttcttcttcactgtgactttgtgcctctgtttcctaaaatctttgcttctttgttgtcagagaggggatagatggatgcatgtgcaaagcaaggctaactgactataacctttcccccagcattatgcataataaagatgttcattcattcattctttcatccaaccattgttattaagagaaagacacaatggggcaaaacaagaatattttattgttttgtgggagaatgtgttcaccccttccattttgcaacttgttctcctgagcaaaactctacatattttttcccatagcataacttaaaaggatatttttttagagagtagattatcaccattttgaagatgggaacttccaaactccaaaaaaaacaaaatagtacaaaattttccagacatatgggattatcaaccactgccaatcaccttacagaccaagaagtgttcaagaacagtgttaggcaaatattgccccaatatttaaaacgggtggggagactcatacaatagaacacaatgcttaatattaaccccctaaaatctagagcaaattaacaaagagctattataaagtctggataatttgacacatatacacccatatcccactttacattttactctttaggcagaaaatccctggttgcttctacaataacccttgacatcaccatcatagatgtcctccacttgaaactccagtctgtctgtctgcctgttataaattgcaatattcagaaccagaaatagtattccagacaacatgagagtatggaaccactaatcactatttggatatcaattcatgtctaccaaaatagcctgtgatttcatttctcttttaccaacctctacacactgcacattggaactgctcctgaaccaaccattccacattctttccacatatttcatgaaaaggtaaagacacatgacccagatggcaaacttggtatattcacctagctcttttcctactccacacccttagaaatgacaggagagatgttttattacatactgaaaccgtaagagctgcgccaaacaaggaacagtacccaacattaaccagaaattttgagacaaaaagcagaaagatataaggcagacaggatcaacttgttggagaaaacgacagccaaacacttgtacacttgtagcaggagaggcctgccagagagagaagtggttacagagtactccaagctctcaggggatgggtccaagaagcaagaaggcaaatggggaaaaacaataggagattaacagggtcactgcatttagagcagccacatctcttggctcctccttcctcccgctcttgaattgagtggtgaccaacagcagcatattgcacaggctaaagtgatgagtggggcacttaagtctaagaggcatcattctaactgaacctatggaacctatggcagaaagtggccttatgctcaccaggcttatcttcctttccctgggcacacagaaagactgtatttgccagttttctttcagttatgttgagatcatataactagtttccagccaatggatagcagtgaaatgtaccccttccaggcctggccatacaatgccccattttatgctccttgttcttccctctctaaaagtaaaggatctgtatcagtccattcttgcattgctataaagaaatacctgagactgggtaattttataaaagaggtttaactggctgacggttctgcaggctgtttgggaagcatagtggcatctgcttccagggaggcctcagagagcttttactcatagcagaaggcaaagtgggaacaggcacttcacagaccaaaaacaggagcgagggtaggggagagctgccacacttttcaacaatcagatctcgcaagaacccatccagtaccacgaaaacagtaccaagagaatggtgctaaactattcatgagaaatccaactctatgatctaattatcttccactaagccccgcctccaatattgaggattacagttcaatataggatgtggtggggacagcatccaaactagatcaggatccaattaagatttgtgaggagccctggaaagaggacaatgccccaagatggaaacagccgggatcctaagagtaatcgagagaaaaataaatctttattgagctactcagatttttggattatttcttacagctgacaaattatccaacaaatattatagtgaaagaagccctgagaggatatggaggtaccacaagagaaaacacttacgcagcatctccatcatctcagtcaaggtattgacaggaaattgatggcatgcttgaaggtttaaccaaagagaaatttacaaatggactatttccagaggtaaagatggggctgagggaaccatcaagggatgataaagctcccagaagttagcaatagtggaaaaccatgacctccctcggtcctgaagggagaggagaaggagcagttaccagaaaccagggaggatagtagccacaatagagagtgtcccaccaggagttctcgctgtagattagaaaataccaccactgcctagcccagggcagggaagaaaggaagagcaatactccaacctttcttcctatcctccagcttcagtgggagtctccctttgactggaccagttggaaggctgacggcaagggaagtccactgatgcagagatcagcttcctggggcccagaagaaggcaaattgggacagagcttggacctggaagacaaactgaaaaaaaccagaacatcctcccagcagatcatcatgcccaacccccagtcaccagagataagcacctgtggtcagcactggcatccacagaggggcagatagtgttccaaaagcaaaattgagcagacaacagggaatcaaagacttaaggaaagagaggcataaaagtcaccgtgaagaagaaataataccaaaggaaacataactcatagagcagacagaagaggattgctgtgtcaagttttaaaaatacaagcgtggctacgatatccataaattaggaaacagctattatataagagaagtaaaattagaaattaaaaatttttaaacagacaataaaacattgattggataaacagaattacaaaaagttcatagttaaatggtaacttgttgatctggaaaatcaagccaagggattatttacaaatatgtaatcaaaagggaaaaacagataatttttttttataaaatttcaatatctacctaatgaaaatactagaaatagaaaaaagaaaattttagaaatggaaaagaagaagtaattaagaaacaaaaagaaaatttcccaagaccaaagaaacatttgaattaaaaatgctcatcactttcaaaaatacctgccctttgacatacagttgtaaattttaaaagttcagagctagatagaaaattctaaatgcctcctgagaaaataagcagcctacctgaaatggatgagtgtctgaccagcaccaaatttctctttgacaatacttgaggctaaaagacaatacagtaataccttaaaagttcaaaagaattactttgaatctaaatcctgattcttattcaagtcaacattcaaaaggaaaaacaaaataaagacattttcataaacctttaaagattctgaaagttaacctttcacacacagaccttctctaacagatttaatcaagcaaaagagaattcaaaaaggggaaaatgttgggcccaagaactaacagtatacagagaaaccagtgaagtacactttggaaatatattttacaatttttaacaacaatctgcaactaaaccaaaatatctcaacatgagaggtggtggtgttgggggaataaaggggatgaagtgaaaacatggtaaggttctagttttgtttggggtgtgcagtagaaatagatacccactgattcaaaatattaataaataatctagcaatgagaaaagagatataactctcaatataagatcttatacataaaaaaataagtgctatattaaaaataaatgtgaccatctcaaaaaatgtgcaattttctacaaaactgtaaattaatcaaaattgatcccaaaaaagatagaaaatgtgaatagactgatagactgttgacaaaaagagtcaaactctaaaatatttgaaaagccaaatatgtgtgaccaatggcctgtgacacagccccatgagatgctgagaacatgtgcccaaagtgttcaggctacagcttggttttatatattttggggagacataagacgttaattgatacatgtaagatgaacattggttcagtccagaaaggtatgacaactgaaagtgggggtcataggtggaataaaagattttctgatgggcaattggttgaaagagttattatctaaagacgtggaatgtctgggttaatataaggggttgtggagaccaaggctttatcatgcaaatgaagcctccaggtaccaagcttcagagagaatagattgtaaatgtttcttttcagactcaaagagactattctattcagtctttatatctttgtgctgacattaatgttggtcagctgtgcctgaattccaaaagggaggagggtataatgaagcatgttcaagtgccccttctcatcatggcctgaacttgtttttcaggttaactttggaatgccattggccaagaggagggttcatcagtcagttggggggcttacagttttatttttggtttacaatacacttataaaaattgaaaatatagtcaaagctctaatccattaaaaaacaggtaccaattccagataattttatggagatttctactccttgaagcaagtatattagttcgttctcatgctgctaataaagacatacacaagactaggtaatttataaaggaaagaggtttaattgactcacagttctgcagggctgggaaggcctcaggaaacttacaatcatggcaaaggggaagcaaacatgtccttcttcacatggtggcaggaaggaaaagaatgagtgcccagcaaaggggaaagccacatataaaaccctcagatcttgtgagaactaactctctatcatgagaacaagatgggggaaacagcccccatgattcaattatctccacctggttcctcccacaacatgtagggattatgggaactacaattcaagatgagattttgatggggacagagcccaaccatatcagctagtgataatcttaaattacatgtgtctgaaaatacacaaagttaacttctatactctatccgaatagcatcattctatacagctagcaacaccttgattccaaaacctgacaaaattatcaccaaaaaagtgaagccattggtcaaggttaccatgaacatagatttaaaattctaaaaaatatattagcaaatcacattttgtaatatttcactattttttaaccccggtcaagcaaaatttacctagaaatgcaaagtggttcaatattgggaaatttctgacatagttgactatattaatggatttaagggcaaaaacattttgctcatctcaacgtatgccaaaaattcatttgataaattaacaccctttctggaattttttaaaagctcttagtagactaagaaagggtataaaatcatgtagcctaggggaaaattcatagaaaatattatatttaataatgaaagattagaaatgttgtattaaggtcaaaaacaagacaatcatacctatcatcacagctaccatctgtcattgtcctataggtcctatctaaaaagggattaaagtaaagtaaataagaggtataaaatgcagacaaaaagataaaaatttttctacttctaggcaaattgttaccccaagagaattgactgaaatactatttaaaataataagatcagatacaaaatcagtagctttctaacacataagcaataataaattgaacacctctcatattttcttctaatacttttagagttttgttttttacatttagttctttaattcatctggaattcactttggcataaggtataaagaaggaatctaagttgaacttttagaacttctaggaatattattaataataacaataaatgtatacataacacacctagaaataaccctaatgaaaaatgttccagaactaaattaaaaaaaaaaaaagaaaacctatacaggagtggttttgtcccctgggtgcatattggaatcactataagactaattaaatcagagactctagggaggagatccaggcatgaatatgtgcagccaggattttaaatctctgttataaattgtaatgatgtcattttttaataatgcaaatgcagtaattttggatggaaaaacaaaaaattttaagcaggtcagttctctccaaattaatctgtaaatcctatgcaatctgaatcaacattcaacagaattttttatggagctggcaagttgagtttaaagttcatcaggaagaggaagtacataagaatggtcaaatgctttgaaaaaattaaaggaaactcctgttaaatatcaaaacatactttaaatctgcattatatgtctcataaatccactaaaatagaaagagacaaaccaatgaaataaaataaaacagtacagaaacagtccctgatatatatttcatttttataaggcttcaattcagtgggaaaaggatgggtcactaaataagttgggttgataccattatatatttcataagagaaattaagttagactttcctccctcataagcatactccaaaacaaattccagatggattgaggagctaaaaaaaattttttaactataaatattaggagaaaatacagggaatttataacctatgaacaagtgttcctaaccacacccaaaccagaagctccaaaagcaaaaattgaaagatgttctcatgaaattttaaagcctttataagaaaagactccttaagcaaaattaaatacaagcaacagccttgaagaacatatttgcaacaattaacaggagtggtatctagaatatttaaagaattcatgcaaattcataaggaaaaaaaatgtatgtatgcatatatatatatatatatatatatttttgagctaaggcctctctccatcacccaggctggagtgaggtagcgcaattttggctcactgcaacttctgcctcctaggcttcaagtgatcctcccaccccagcctaccaagtagctggaactacaggtgcacgtcaccatgcccagccatgtagagacagggttctgtcatattgcccaggctggtcttgaacccctgggctcaagctatctggcctcccaaagtgctgagattacagatgtgagccactgtgcccagccaagaaaaaaaaaaattaagcaggaaaaaattgtttaccagaaagtcttgaaaatatatatagatatatatagatatatcacacacaaatatatatacccacccatacacacacatatgcacacacacacacacacacacacatatacacacatacatactcacagggccaaaagcaaatgaaattatctgataaccaggaaattgaaaattaaaacagcaataacacaatagtctcccatcaatatggtaaaaacttaacagactgataaaaaagcagtgttcacagggatgaagaaggggagaaatttccccattcacgcattcttggtgaaagtacaaattggtaaagcttttctggcaataatttttttaaaatcacaatcataacctttgagtcaataatttctaaagaaatatacctatgtatgtgctgtttatataaagatacttaggcaacactgtgggcaatagaaaaaaattaaaaacatctaataggagagcagtttaaaaaactgtggtcatcagtttaaaatattgggctcttatacatgatgaaaaaaataaatcatagaatatttatagtacgctatcacttgtttattaaaacatgtatataagtacagtctacacatctctgcaggtgcaaaatctgcagagaaagaactggaagtatagtcacatcctttcactttggctgtcaggaatgtaatatacaaatgttttagcacatgtcaaactgaactgtatttatttgttttcatgtctgtcccccctctaagctaccactttttgacagactgtcttttttctccacaggcagtgctctataaatgtccgataaatggctgcatggttttcttgcccttggacctgtcccactcaacattttagaggttcaaagaatgatacaatattcagtttgaaactcattatcgccatttactacttgtatgaccttgggctgttagttaaactcattgagccttagttttcccatctattatgagaagaaaataatgcctaagtcatagcatcacttgaaggattaaataatcaactatataaaaagttgctagcacagtgcctggcactgctatggattcaaaacaaacccttccaaacttagtggcttaaaactatgactatgatttaacatgcatctaaatctgactttgggcagggctcatcagggacagctcatctcggctctactgctataagctgggacatctggattggtgtgaaggatcactcccaaggtggctccctcacatggctggcaagttgttctgggtgttggaccctccccatgaaagcctctccacaaaacagcttgggcttcctctcaacatggtggctggattccaagaataagcctctcaagagatattaataaagtagatgctaccagtttcttaaaactaaggcctgaaaaatggcacgatgtcacttcaccatatgccattggtcaagcagttagagagtccagatccaatctgcctctggacaccaattattgacatccctctagcatgcaaaatgcatttatgcctcccaggatcctgcaaacatctcaaccctttaaatcctgtccaagtggaaatgaagctccctgagagtggccctttgggtacaacatattgagtactgttcatcaccatctgactattaggaactaaagaggcaagttacctttactgaccaccaccccccagacacacacaaatacacacacacactccacatacgatagtggaataagcagaggataaccacaagagacactcccgttaaaagggggaaacagaaggcacagagctggcaatggcccccagagcacttctgcaatccagctccataggtgttgcaaattcctttctagagcctagtactctccaatactcttggttgtaccctctggtctcctgtttctgctcctgaatatcttcctcttctataagaataccgagttggtgattttgtcggattttcagtctacttcctgcttctagaggttggagctccatctctgtctctttcaatctaatcaggtggtgcttgcagtcaatagaggctattattattgttattaataacatgaataaaaatataaagatgccttacccaataggtaatacttaccaatatttttggaggacagaattaaattggttaaacccaacaagatgaaattgggtaagagtaaataaaagtcctgcatttagactttaaaaatcaatttcataattacaggatgaggaggctttggcttactggcatgcttacctcccagactaagctgtaagcttttagtgggagaaaattggggggatttagctgacagcaatctcacaatgaaacaaaagcatgaagagacacacactgtaagtggcatcctgacaaagctgcttgtgctcaggatggtgaaggaaataaaaccacatcataggagtaactgtggacaaaatgagtggctttgcctggagaagagaaagccttagggaagtggtagagcaagttatcaacttcacgtgtttgaaaggctgtcacataaaagaagaaatggactttgctccagaggacagaaccagcatggctaggtggtggtttcaggagagctaactttcatcagaataaaaaagcgtttcccaacacccagagtccttgcgctcaacctcagttgtcctactggcatcacctgaagaatgttaaataatatggatgctcaaagacctaaaaacagaaatatcatttgatccagcactcccgttactgggtatatacccaaaggaatatacattgttctattataaagacacatgcacacgtatgtttattgcagcactattcacaatagcaaagacatggaaccaacccaaatgcccatcagtgatagactggataaagaaaatgtggtatatatacaccatggaatactatgcagccataaaaaaagaatgagatcatgtcctttgcagggacatggatagagctggaggccgttatccttagcaaactaacccaggaacagaaaaccaaataccacatattctcactcataagtgagagctacatgatgagaacacatggacacacaggaacacatggacacacagaggggaacaacacacactggggcctataggaaggtgaagggtgggaggagggagaggatcaggaaaaataactaatgggtactaggcataataactgggtgattaaataatctacacaacaaacccccatgacacaagtttacttatgtaacaaacctgcacatgtaacttaaacaaaagtttaataataataataaacttaacttaaaacaaaagtctaataataatattgatgccagcagcttccccaggacaattctatcagagtcactgaggatgggttgcaagcagtaaagattttataaaatggatcaggtgatgacattgtactgccaggattatgtacattgaaaggacctaaagcaaatatcaataaatgatctgctcacaaagaagggacttagccaaccacaaaaaggtttaagcaagtctgagtggctgtcagtattgttactatagagaagtcctgtatcaagtgatcaggcagatgagctttagactccagggtagagaatgattaaattccactgaacaacagaaacagcccagagattcctaatgcagagggagccgtgccatgttcagaccatatttcttccctccaccccgtgccaactcagtctcctggaaaaagaagatggaaccagtcctcagagtggatttctttgtccaaatggacagtttgagtcagggaaccatttgtttagaatggctaagaaaactgaaagtttagggtagagcaaggggggaaagggggtaccccaagcccctgacatgggtattttcatttgaagttctaagaccttatttctgcaaggaggctcttctatctccctgacttctacccattgagtccccaacccaactccagctctttatatcaaggcaaattattctctttctcatcacattctgttcaactgtgtgcagatagctcgtgtttcccaccatttgctgttgctaagtcaaagtccacacaaggtatttagttcttatgaatatacatcagagcctgcagcatcaaataccagattctctgcccttctctgatctctctccagctctgcttctacacctttctattactgaagtcccacaaatgtgttaaaatatcccagctgtgctaccagcagcccagaacacggaataaaccatactgatcttactcttgaaaaaactgtatttcacgaacagaattcttcctcattgttttatatcgtaactgtcattatgagagaagacaccactgcagccccacatcccgtgatccaagggcagatacctagcacatatcaggtgaatatcttgtttctccatgttaaattgtgcttaattgtttttctatttgcaaacataggtctccttcatactgggcattgaccacaatgggtggccaaaaagagagaagattttcttgaatatgaatacagatttaagcgggagaaattgttataaatcatggcactgtcttccaaaggccgagtgcacagcataaaactttcccggttcatttcaagccactattgagttcatcaatgctttatttgtgaaagtaaattcttagccttacaaaacatctattcaaacatcaatgactcagaattctgggactttcctgctagtctggaaatcatgtttatgatacaagtgcctagttaataaaagcctgccttccatgcgtcaaagacctttatgatcttaaagaaagaaaaagtggagacgctgcactggctgctttcctttgtccttcttttgctatgtccatgatgtttgtgaggttttgttgcacttaaaattaattggtggatatttggggcagcgaaactatgctgcatgagactgtaatggtggatctgtgtctttatatgtttgtccaaacccacagaatgtacaatgtggagggtgaaacttagagtaaaccacgggctctgggtgatggacatgtagcaatgcaggttcatcaattggaataaatgcaccactctgatgagggatgtttctagttggggaagccatgcatgtgtggggcctgaggtgtgtgggaaatctctgcaccttcctctcggttttgctgtgtacttaaactggtctaaaaaataaggtctattaataaatagataagtaaccaatcctgttggaagctggccttgctactgcactcacaggctcttaaaaatttgagggagaatgtttcccttcaaaacacaggaaaagtgcaggtaggagcatcgtggaaggccacctttggaagctggagatttctggagaggttgctcctcccttaggatgtttatacctgctgttctccttacctagaaatctctttccacaggttttgagtgactgattctttcctgtcatgcagaactcaacttatttattttttttctttttgagaagagtcttactctgtcacccaggctggagtgcagtggcacaatttcggctcactgcaacctctgcttcctgggttcaagccattctcctgcctcagcctcccaaggaactgggactacaggctcacaccaccacacccagctaatttttgtatttttagtagagacagggtttcaccatattggccaggctggtctcaaactcctgacctcaagtgatccacccaccctgacctcccaaagtgctggtattacaggcgtgagccaccacgacccaccagaattcaatttaaatgtcatctcctcatagaagccatccctgacaacggtaaggtgatgtatctgccaaaatgagcaaggagagagagactgtggtccgaaggattggcccccatctcagcctctctctgtgtctatacccttgcccagcctcatcgtgcaaagaatgcattttatttccccttgactttcagcttggccatgtgacttgcttcagctgatggcatgtgggcagaaggagagtttgccagggcagcccagacctgaagcagccttttgttttcccatttgcctcccaaacctctccaccagaagagcatgccactgctaaccccgtggttaacctccaaccccaggcagagaatgagcgatgcctggagcaggaccacccagccacacccaccacgggtgtgcagccacaatgagttctcctttgcagtcactgagttttggggtgctactatgtggcatgatgtgacaaatgatataacaggcgtgtggagttctcttcataaagagaactttatggcacccagcaagcatttgttggccatttatcactctccacatcagtcttgcaaccccttttgcattttgaaattacagatgaagacaaagaataattagcaagtgctcatattgcttattatcgtaacatctgtcatatttatatcaaattattctaaatgtgcaaaatatatgttacccatgagattgaaatatgccctgaggtcagaaactccactgtaacccactgaagatgagccagcaaagtccatcaaggctgcctacttggctctctatgcttccccaacttggtgccatgttgtccctggcactaaccttacaggaggttggtagagggtggaagagaaaggaaggggggcaaaggacaagagagaagttaagaaactgcactgacacttggttggaaccaacagaatctactccttacagggacatcacgtcctgagatatttatgactattgcacaagagatcaaacgtcatcatcctcttggggaaatggcttcaaaacccatgaggcagtttataagctctgaaatctcctaacaaatgaatggaaaatttctttggaggttccatgatttgtctgccaactcccaagaatacgcacatacaggcacacacagctgcatccagaccttccacctcttgctgctgtcaactttgttagctgagacaggccaagacatactcaccagccccttgctgagatgtgactcacctctcataccctctttcccaacatcgtcatcaatgccacctccccttcccacaggctactcctcaccaccaaaccaccagaaggtgtacagtggccacagccatggtgagacaccagcagactcccacatcccttgcggatttatttggtttcatcgatgcattagaccacacatgggaagaaaatgagcaagtgcaagagaaaggtttctttgatcctaaatctggaaatgaaatatatttacataaagccatgaaaagccagaaatggccaatgagaaaccacagcttgactctcagagttaaacaccattatcaagcttttgtatgtccttaatggctcctaaaagctccatttaaaaacaaaccaaaactctggccagagctgaagagactcttacaatcagtgaggcctgggcctgggtgagatccgtcaagcttgtaaacctctcattccacccctcaccactcccctcacccagtggcattaacacccgtgagcttcacccatacataactcagctcagccactcttattatcttggcagcctccgggagcctttcgccaaggttctgggctctttcagtcaacatgaccaattccacatccttttattaattactaaccatttccccttgtagtcagccctgaaatccctgctttgatctgcctgacaggtcacatggtgtgtgcttctgaacacaacccctcccatggccgacttcgaactggcaagcctggcagacatacacacaagctagaaagacatttcctgtagatacaagaaaaagagggagttctaccaggaaaccaatggccacagagaatttttgttaattcattcttatatataataaatagattatttattattaataaataatctatttattaattataataaataatctatttattaattataataaataatctatttattaattataataaataatctatttattaattataataaataatctattaataaataacttgtttattaattataataaataatttattaataagtgatttgtttattaattattaataatttattaattattaataaataatttatttattaattattaatgatttttaattattaattaatattaaatttatttatttattaatagcctgttggtatgtatttaagagcaaaataacagtggctgtcaaaaacaccctacatcctgtccaattagagagaccataacttatttagatcacaaaaagaccacgattctgaaacctgaagtctaatgagctgaattatgtgcttaacggagaagactcatggatgagccctcttgcagcttctgttaaccttttctgaaggcactgggtcctccacagatcctgactgcaggcagaatggctggaatgatgagatgcctgtcttgtaaccaagaccaggacataagcagatgccattcatccagacccactttcttccttggaccactgtctatataaacagcctttctgttatttccagtgtggcattacaacaaaccagacacatttttcagggcacattgatctatcccaagggtgtaggtctattaattccctcgaggctgacagtggatgcttccagggaaatctgaaggcaagcacacaactgaatttaatgaaaatgattgattttttttggtccaccccaagtatcaaaaagaaaacaggccaggcaaggtggtccgcacctgtaatcccagcattttgggaatctaaggcaggaggatagcttgagcctagtagtttgagaccagcctcggcagcatagtgagaccccatctctacaaaaaaaaaaaaaaaattaattagctgggcatagtggtgcttgcctgtagtcctagctactgggaaggctgaggtgggaggatcacttgagcccaggagtctgaggctacagtgatcagtgattcaatgattgcaccactctactccagcctgggcaatatggtctctgtgaaaacagaaaataaaaaatacaacaaacagccattaacagactcaaattggttggcaagagtcagatcccacatcagctaaaattgccacatgatataaaacactaaataataaatgtttacctttattaaacattcagaccatttctggttaagaaaaccctgaacctttttcactgcatggcttaagatgcaggtaagctaaccatcatccttcctttctcttggcaacacttacgcatacagatcggtaatgcccgtcccactgcaataaaaaaaaaaaataccacatcgactctacatctgctgcaattatcgtctggtgtgaagatcaaaggggccttttcccctggcagattactcgtctacagttccctggcctgtcagtgtggtctcagctgctcccacttgtcccattgctgctcaggaatcagcagccgcctagatcttccagctatgtgactgggctcataatgacagtaattgccagtctgttaagtcacctccaaccaaaaaggaaaatgccttccagacacacttctcaggcccatgtgaagagataggaatgaattcataaaagaaaattatccagtcctgtttatacaatgccactatgaccaacaggcttttttcttattaatggctttcatttctgggccacacagtggaacaaagcgcttatatgtccactccttgagaccattaagtccttgacttgctttgaccattaagaagcccaaagagaggtgtaggtctacccttgtaccagttcctctctccccaaagtatttttggggctggggttgcctttgggattatacttgcccagaaaagagaccatctgggttcttatctgcaatgggagctacatgagatttaagctacgttccttctcatttcctcactacttttctgtttacctttgatccttgttggttattgtaggaagacgtgattggtatggcaatgggataatatgtatgacagtttcagtcttattttcccagtacaacatgccagttggataattcctctgagtaaatattaacatgaacattttcaatataaagcccattagcatccacaaaactttggaattgtatgtatatgttggattatactttcacagaggtggatttaaagaggtgaaattttggctgcaataaaagattcattcagctgggtgtggtggttcacacctgtaatcccagcactatgggaggccgaggcgggtggatcacgaggtcaagagatagagaccatcctggccaacattgtgaaaccctgtctctactaaaaatacaaaaattcgctgggcatggtagcatgcacctgtagtcccagccactcaggaagctgaggcaggggaatcccttgaatccaggaggcagaggttgcagtgaactgagatttgtgccactgcactccagcctggcaacatagcaagactccatctcaggaaaaaaaaaaaaaaaaaaagattcattcattaatgtaatcagataatgtacacctactttaaatgtatatagaatatatccttggaaacacttgtgtgctgcttgaagtctcttattctcagctccactctctctcctttctcctcccctgtgacccaggagcagaaagcctggaaactacattttccaaatccctcttgccaatcagcctcttgttagcttctacaatgggaggcactagtagcaaactggaggtggaagcaagggagatgctattttttccatcttctggtagtgcctctagagatggtggtggcagcagcaaaggctggcaagggtggcttctgggattctgctgggtcagctcagtgttaatagcaacaatcttggtggatcagcaagcatcatgttctctttggctttcaagcctagggggatagtgacttcctgcagttaccaatctgtaagtaagcttgactccctgtatttactccttcgttcctctcaaatcatgcaccaccaatttgtatgaaattccttctctgaaatatttacagcggtttctagacagaataatgcactgattggacactgactgataacttatcatgcaaataatttatccccacacactgtatttgctatgaagcaaatgttaatcagatggttaaagatgatacggtaacaataaggtcatttcattcagtctccaaattcatggcagatgggcatggtggcacatgcccatagtcccagcattttggtaggctgaggcagatggatcacgaggtcaggagatcaagaccagcctggccaacatggtgaaaccccgtctctactacaaatacaaaaaaaagaaattagctaggtgtggtggtgcacacctgtaatcccagctactcgggaggctgaggcaggagaatcgcttgaacccgggaggtggagatcacagtgagccaagaccacactactgagtgagactctgtctcaaaaaataaaaaataaattaaaaagatgatatggtaatgctaaggtcatttcattcagtctctaaattcatggcagatgggcatggtggtgtacgcctgtagtcccagctacccaggaggctgaggtgggaggatcccttaagcctgagaggtagaggttgcagtgagccatgattgcaccactgcactcaagcctgggcaacagaatgaggctgtgtcttaaaaaatacataaataaacaaattaatgccagaattaggaaggaaaatttaattacataaattctctaagactctataaaacagccagatgagtggtccaatcccctttccaaatagctttggtttcaattttatgtttgttggcttggggtccgtccatctgggtcatgtattgggccagtgtgggatctcaggcattgttactgggttcgcacggctgttccctaacctaacatggcagcattagatgccagcactttgatccatgcacacacacaggatatagacataagagcttcccaaaccaactggaaagagtcccagtgggaatactccacgacatattcatcaaagtcaaatgcagagcaaattgacctggctcattaattatgaaaattctctcacaaagtgacatgttgctaactatgtggaagcttagcacattttcacgtggttctttttgtctacttggatccaaaatgtcacatttagtaatgcgttgaggttttcttttccttacttaggaagaaaaagctattttatgccgaacccacatctaaatatatatactcgtgtgtttacatatgcccactatgtggatagaggtagcctgttggtaagaaggaagtttgctatgccagaatttgttttacaaagatatatagaaggaatttgaaaaataaatgttgattattttaaaacccttgaatctatgttgagcgcctgtcccccctggactaactgggcaaattcagacatcatatgaaaacctggccttatttctctacatatgttggctaaagcagtgaaaagaacatgggcctctctccaccatcactgaaaggaatttcagttccttaggtctttcatttcctctctcaaaatgtaggaatgagaactttcagaagctcacaaaagttacccttctatattcaggccttttatctaaactgagatggtcattatgtactgcttgacttttaaaagctcctaaatgtggccaggcacagtggctcaagcctgtaatcccaacactttgggaggctgaggtgggtggatcacctgaggtcgggagttcgagaccagcctgaccaacaatggagaaaccctgtctctactaaaaatacaaaattagccaggcgtggtgggccatgcctgtaatcccagctactcgggaaggctgaggcaggagaatcgcttgaactcgggaggcagaggttgcagtgagccaagatcacgccattgcactccagcctgggcaacaagagtgaaactccatctcaaaaaaaaaaagctcctaaatgtgcctactgaatcttatgacaatgcctgatcattgaaaatcctttctggatcagttaggttattagtttggctatcattaaaaaaggtcaaagtaacagtaacttaaattgataatagtttatttattttaaatatggtctaatcataaatattcaaagtgttataacactccatagtatcagagttcccgctcttcctgtcctgctgttctgccatccaaaacacatagcacgtgcatacctgtgcatacctaagcctgtgcatagaggccccacagcaactctgcacatagccctcaaggtcacatcccacgggccatgtggcagttcttgctgcaagggaagctgggaaacataacctttgttctgggctgcattggactcaactttactaaaggaaagggatggctgagaccagccatgtctgccacagccttcttttcattaaggtgcagcgtttccctaagtattggcacagagaaggcacaaaatagatatgtgttcaatgaacaaataaacaaatgaataaataaaattcttcagggaatgcttatctgaaaacagacatgaaaacagtttgctaggatattcacggttggttgttttcatcaatttctcagaggagaaatttagtttttattagatcattaaatcaatttaaacagacatatatttgtatatcagcatcaggaagagcaatgtaaatgtcctacgggtgacatcatcatattcttccccagcatttctcaaacctatctagccatggaaccctttgtcagagaacatttactaatgatttacaagacattcatgaaaaatactctcctgcctaaaatcttagcagaaaaatagaattcagccatttatccacttaggataggaccataaagaagtcaatatacatgtaaataaactacatttttttaaagcaacaagagagaagtcttttcagcacatactattaacagtcccatagtatcttccaatggctgtgaataactagtaggttgacctgccaccttacataatgtcttcatctccccagtaatttcccaataatcctggagtactggaaatggaagacaccttaaaatggtatcaaagccattcgtcggccttcagatcctaatgtcactaaactaactgagagaaaccaacatcagagcaaaacctcatgacatgagctcattcctacacagggtctggaaaacatcacttccactttaagtacacactaaaaaaggatgatgattcagacagacaatcttagctgcactgcgcgggtggacaaggggattgtaaccagccatccaggaaatctggcatctgtccagaaaacaagtctaaattttgaaaggtctctgcctaacacattcagtttatgtccacaggtctctgaggaagtgcacttataaagaggagatgactacgttagaaattatgactgaggcagcttttgcgctgtaactcttgcttaaaagggaagtacgccagttcccctttgaaacagtttctaagcagcaggtggctaccaccaggaagccaggcacacgatgcagcagtattgatatctggctgtgttgtacagatcttccctttatccattcgaaggatgtgaaagcgagggcagagggtagaatttttagctggtaatggtctcttttaatcaaagaactcaataaattacaaagagactgagtcacttgtcctgtctcaaagaaatgtcataagaatagctcagggcagtaaaggaagtttaattaacgcagccgggtgtggtagttcacacctgtaatcccagcgctttgagaggccaaggcaggcggatcacctaaggtcaggagttcgagaccagcctggccaacatggcaaaaccccatctctacttaaaaaaaaaaaaaattagctggacatggtggcacatgcctgtaatcccagctactggggaggctgaagcaggagaatcgcttgaacctgggaggtggagattgcagtgagccaagatcatgccactgcactccagcctgggtgacagggtgagactccacctcaaaaaaaaaaaaaaaaaagagctcagaattggagaacatttataagtagcttggtttaggggaggacaaatgaggagaaagccgatctaaaataggttgggacaatctattagccaactatctacactctcccaccatagttttcattattgcattaatgaaagctgagtctccagaaattaaaaaagactgtttctcaacctatctaagctgcaatccgttttaatgaagctaagtatagagacagagggaacctagataataatagaaataactgtgctaatgtttaaaagaagaaaagaatgaggttaaggttaattgcagtaaataataatgaaaaatgtgtgttattcaatatagtcactaaaaggatgaaaatattttcaaatatgactcattccagttgaaacaggaagggaagtaaaagcatcaacatctgacaagacattaaactccctaagtcagagcagcgctgcccctgtggggaagaaactatcctcctcccaatggcacagaaccaactcactcaagccaggcgcctctggagaaagtcactgaatcacatatgtgtgtgcacacacacacacgacaatagccagccagagagtgagaaagaaagagggtatactgacccctaaaggaccaaggcagactgtagacatctttcaagaaggaaaggaatgaagaaaaaaaaaggcaatagataatttagctcaaaatcatgttgggagagggttgaccagttcttggacccagggatcttgagagaaagagtagatgagcccaaatgtcctcagtaggcacttgaggtaaggagccaagagctgacttagaaggagaaggaaggaggacccacaggaataataaagcaagaaggagagcacttaaatacaccacatgtcttcaaattcgcaggccctagggatttgtaacttgttacaaagttatttctgaaggctagaaaaatgtacagaaaacatatgctgcttcaaaagtgggagtggagagagtgggagaaagggatgacctgcttctgtgaataaatgttcctattgtaattccttaactggcaaagtacttttgtgtaaatgatactttgtaaacccataggcagaaacctagctgagaaataatcagcacaaataggcagagtacaaatgcgtatttatgcaactttctcggttttttatttcttaaaaaaaagcactaaacttcacatttacagaagaatgaaaggcgtgtcatttgttttaattttttaagatgttgatttaatctaatcaagattttggtgcaagtggaatcaactaccttaggaaggcagatagaattagagtcttgatgtgcaactcaaatctagatgtttcctcctgactttcccccagctcagcctcctcatccaactgccattggaccctccaccttcccagactgaactcagtacttccccttccttcactctatctcctcttccattttcatctctccttctcctctcaaccctcttgcactctttcctagacctcagttaatgaagtcggcatccatccaacctccaacgcaagcaatattttgaaaaacccctgcttgaaataaatgtcacttccttcacttatagaataaaatccaaactctcccagcatcatagagaaaagttcttcacatataagtgcccatctacctttcaaacctgtctccgctccttaccctatgctcccaacacacccaattatcctccaagcccccaaatccaatcacattcccttcatctggggtgccctccaggtctttgcccggggaaatgctatccactccaagactcagctgaaacaccacctctctgtgaagacatccctaactccccaggcatagtctgtacatctctcttttatccctctatcgccttgggttaatataatagtgtttcccctgtttctggtaattgatctgtttttaagactctcttcctgagtggaaagcaagaagatattgccttcatctttgcatgtgagcactaagcaccttggtcaccttacctaaagggaacacgcttcctgctatgtttttctccctagcgctaccatatacttgcttgtttacttgtttattacctgtctccctccactggactatgaactacatgaaagcaggtatttttgtctattctgctctcctctgtagcatcaatgccctgaataatgcctggcacatgataggcacttaatacatatttgcatgaacgtggatccaaaatgacttagaacagtgtctaacacattcaacatacaagtacctcctactccctagaatttttctcagtattcctccaattctccctccacctcctctgcattcctaccatgactacatgaggttccacaatacttggcatttcatccattaatgtattttaatcttgtctttctaaggagattataaaaatcccaaggacaggtgccacgtcttttaagaaagtcaatgttaagtataactcatgctaggcacttccatgcttattggatcacttaagtttttttcccaaacatcctgcaaaattattttagtattccaggttgacaaataaactaacagaggtgcagatctacctaaattcacatggcctttaagtagctattcaaatcggttttgactctaacttttatgttctttccagtacttcacaccgcatctgttaatttagctctggctgggtgcagtggctcacgcctgtaatcccagcactctgggaggacaaggtgggtggatcacttgaggtcaagagtttgagaccagcctggccaacatggtgaaaccctgtctctactaaagatacataaattacctgggtgtggtagtgggggcctgtaatcccagctactcggaaggctgaggcaggagaattgcttgaacctgggaggcataggttgcagtgagccaaggtcacaccactgcactccggcctggacaacgtgagtgaaactctcaaggaaaaaaaaaaaaaaaaaagctctgttagggattgaattgtgtccctgcaaaatttatatgttgaagccctaacccacaatatgactgttagataaggcctttaaggagataatgttaaccttttaacaaggttacatgaagtcatagggtgggcccctgatccaataggactaatgtctttgcaagaagagaaagagacaccaggaatgtgtgtgtacaaagaaaaggcagccacctgagagccacagggagaggccccagaagaaaccagccctgtcaacactgtgattttggacttctaaactccagaactgtgaaaaaataaatgtctgtcgtttaaccacccagtctgtgatattctgttaggacaaccctagaagactaatgcaagcccattgttaaatttttccaaagctatagaaaagccaaaaggagaaaaacaatcacccacaaactcatcatccaaaagcaatcactattaacatttattctatgatctggtcttctttaactttgcatatttttaaataattgtaattagactggaaatacaaattggttacaccagcttttcaattaatattcttaagtttgtgtaccattttaaaattaatattataatgatatgacaattactatttatccataaggagaaactttttcacgtatttttcaaaatgttttcccttgtgaaaagaagaaaaaaacttttcccttgtgaattgtctattctttgcctactcactatttccttgcacattatataaagaatattcttttttatccattttttggaatgattttctatgctgtttctcaattatctcacccagtaagtacctaccattgtgctgaatacaaaattagtgtgacccaatattgatgatcaatcattaaaaatcattcacccaaccgaatgatcaaggttaacatcagcggtatgaagtcatgttgacatcacatgcacctgccatgaggcaatgaaaagggcacttcatcttcatggtattcttcccagaaacccaaaaccctggtctaatcacaagaaaacatcagacacatgcaaatggggaacattctacaaaatgtctaaccagtcctcttgagaaatgtcaaggtcgtaaaaaacaacaaaagactgagaatctgtcacagattggagaagactaaggggctgtaatgactaaatgcagcatcgtatcctggattagattctggaaaagaaaaaaagtcattagtagaaaaacaaatcagaataaagtctatcgtctaattaatagtattgtatcaatgttgagttcttactttttataaatatgccactgttatgtaagaggttaacattaaggaaaacaggtgaagagtatacaaaaagctctctgtactgcctttgcaactcttccataaatctaaaatgatttcgacattaaaaggtgggttttgtttttaatgattcactctggatgcataactagtggcatttcacagacaatcgcacctttatccaacacaaccttaaccctttcatcaacaaccttaaattacaaaataaaagaagtatttattgagttcataataaattagaagatagctaagacccagaaacagagattacgtattgagtgtgagtttgctgagctaaaaaggagattgacaacaacaaaattaggtccatatgacaggtcaaaatcatgctctctaagcagaaaaagtggaccacacaaactaaagacaagttcccccaaggtggcatggtatgttggaaatatcctggttctgaaattgagtcacacaactgccaatttcctgttggttaggaaccttaggaaagtaaataatcttccagagtcttggtttcttcaaatttaaaactgaagtggtaaggtttattttatgaaactgtggagtagggggtcaatcaactttttctgcgagttaggaaatatttttaggctttgtagatcagacggtctatgtcccagccatgtaactctggtgctatagctcagaagaagccacagacaacgtgtgaacatgcggcctgggccttaaagaagaaagtagctggggagtaagtagaaaaaggaagaaattaatagcttccatatgccacagaattcacccaatgccatagctgggatcatgcaggaggagcactgtggtcagagatctctatttccaaatgtgaatattgttcacagaaaggatatgctatcagcactttgggaacatgacagctgtaacatgtgtttgctgtgttatttaaaaatatttagcacaaccatagaagacaatacaaataaataagaaggatgaaactcaaaggatatattacttaaccgtaatggctaattttatgtgtcaacttgactgggccagaaggtgcccagacatttggttaaacattaccctgggtgtttccatgaaggtgtttttggaggagtttaacactgaacttagtagactaagtaaagcagatttccctccctcatgtaggcgggcctcatcccatcagtcaatgccctgaatagacaaaaagaccaaccctctcccaaggaagagaggactcctcctgcctgacagcctttaaactattgtcttcaatgttgaatagaaacattggcttttcctttctcaatggcatggtcacagacacactttcaaaccactacattgtgattcttttattagaatgggaataaaatgtgtccttcctggtgaaagaacatagttacaagggccatgccaaaaacacttccttgagatccccaattgcaaatcaggtaaacctcacatgtgtcacctgcattaaacccaccagtgattggaggagagtgtcacagtgagcaatggatgtctttagaaacacacaggcggcctctcacggatgtctccaagtgatagaagatgctataaatatacacgagggtatgaaaaagcagcctttgctgacagaaaccctcagggttaagctgtcagaaaataaatgatactggtataaggcaaggagaacttgtttgcaaaacagaacaacctgagttttccacctctgacatggacttatctaaaaagatgctacatgagaaatacttccgagaattctgatagtatcctaatttcagagacccttgatccagccatgagtttataaccagaagggtgaagaactcttcctgagaaaggttgcattttgcttctatgtcaagaagccattcgtcctccctttaattccaattacagaaattcatgctaagaaatgaaacagagatgtgagaacaatgcatctgtaacagtgtttatttcagcatcatttctgaaagaaaatttgaaacaatatctaagtgtccattgatagagaaatgattaaatattaatattaaatgattaaatatgattaaaaatgcagcataggcaaaaggtagaatagtatgttgctgtcaaaaatcagtttttgaagagtaatgatctggaatacagtatgttcattacataatataacgttaaaaggaggatgtaaagttatacattcaacatgatttcagtttgatctctaaaatggtaagaattcttgttttcataatacttttctgtattttccaaattttctacaatggaaatccatgacttttataatcagggggaaaattattattcaaagaaatggatttgtcccaaagaaaactcccccttttcagtgacagtatggttccaatagcccagcacatggataagagaagtgactacaataaagattaccatgatcccaacctctaaaacattctctctccgtgcctcctcagcaaggtatcctcctgctaaaggcagtgtctacacccgtagggggaatactattacagacactctagagaaccaggccaacagtgacttttcagttacattgacggctcaaagtttgaccacaaagcagcattagcagagtgggttctgtctattcaacaacagatgatcctgcctcccaattatcacagataagccattcagcaaatgcaccatcaacccaaacaatacttgcagggttctagcactctgtgcgatgagtattcaggcgaacggctaaagttcgtgtctggctaattttaaaatgtgctgactataaaattttcccagtattgccagtatagggaagagcacctctctaattaaaacagctcctctgttctctgtttcttctttcaatgacttaacattaccatcgccagctttgtcttaggtgtacaacagtctagagtacttgtaactgatgcccagtgaaagggcaaaactgagccgttcaaatgcttcacagcctgagcggttgtgtctgcgtgcattaatgagcatgcatagtaatggagatttagcgtggatacagagggacatctagtgaccagctaagtaaaaaacacagtgcagcctgcaaactacatggaggcggccatggatccttcacctaaagttgtgctttatttgatgaataagtattgaacatctattatgtccaaggcactgcactaaatttaggggttacaaagaacaagacaaaaatccttccatgagagacaggattttccataatttaaagctgatggaaaaacatctccttaagtaatgagtaatttttctgttgtctctatttatgaaaggcaaaacgaaatttcacactcaaaagagaacatccctcaaaggaaacccaaattatttgctttcctattgtaagataattttccaaaagcactagaaataaagtaatattctatgtcagcaattccaaacttgcaatacatgcaacaagttttttctttgatttgtgtaacaatttcccatatttcttcccgaacccaaagggatgagtattatagaacagtgctctcaaaataaattaaaacaaacttagccctgataattttagaaattaactttatcctactctttaagttaatcagtcccaacattaggctcacaaactaaccaaaagtaaatacaaaactggaaaatgctgaattcaagccccaaaactactatcaaagacacgaaagcaggaacttttctcacctaacatccaaaggaatctgtgtgtgtgtgtgtgtgtgtgtgtggtgtgtgtgtgtgttttaatcctttactccccaccaccactaaaaaaatattaatatgtgaaagttttggaatgtattttattttgaatatcataatgttttgcatacataaaatggcacattgcaaaccacactatcatgcacttcttttctgttataagaggaggaaaacaattaaatattgctgtacatggagcacgtcaagaagtttgtgagcaatcctagagagggtcgagtgcctttcttctgggaagagccagtgacaacccaaatcaccgggtcatgtaagacccatgaaagtaaaagcaactcaactcagagtttattttatttgaggtttttggtgaataagaaatacaggatattgccgttatcttcaaagtgaagactaagcaacattaaattattcagtaaacgcagtaagtaaaaataagctccagttctaccttatatacatttcagaaaaagacgctatgatgagggtggtaatcaggataaaacagagaccatgagaccaacgtggaccttaccatgagccacatgccctgaaggtagactggctatctttgggaaaatctcaactcttcagattaaaagggtgaatgaatatttccaggatttttaaattaaatgtgtttagctatggccattgatgcctttttgtcctcattcattttcttcccaacctttagggttactcctgcagccctctctaagctgcattggcctctctcaccccagcagccctgtagcaaaccccacagtcccatgctggccagaggaaggcaagggggctcagcccataaaacttcatgactgtctcagctctgcctctttccttctggccttttctatagtcatggctctcaaatagctcacctgtcaccatctccttccgacagtgtcttccagatggctttgaataccagtaccaggccaggctgagcccacaaagggcaccaaccagataggccactgagatggggccggggtcagacctattggatccatgcatgctgtatacacattggtgtgcacacacacacacagcatgagcaagcacgaacacacacaccccaacttacctcctcattacacattatacgcctgcatgcacacacatacacccctacttacttacttcctcattatacatcacacatctgcacacacacacaaccactacttacttcctcattacacatcatacacctgcgtgcacacacacacaaacttacctcattacacatcacacatttgcacacacacacatccctacttacctcattacacatcacacatttgcacacatacacatccctacttacctcctcattacacatatctgcacacacacacacacaccactacttacctcattacacgtcacacatctgcacacacacacttacctcctcattacacatcatacatctgcacatacacacacaccactacttacctcctcattacacatcacacatctgcacacacacacacaccttcccacatacttcctcattacacatcatacacacacacacatccctacctgtgtacctcattacacatcatatatctacacactcacacacacacagcctttgataagaagaattgtatgaaataaatgaacaactggtggccactgtcattaaaccaagcttgctcacccctgatttcaacagtgtcggctccccagaaaggaggccaggtcaatgctgccgtgtcagcagaaaggacagtgtgcttccagatgaaaaatacccagagaaattacaaagacagttatggtgattaatcaaattggaagacttagaatttaccttcaaacaggatttctctcatgcctctattcacaacagcataagaacgtacacatcgggacagaacagtggcccagcaagacctccatccagacagctccagcctgtcctcttgtcacaggccccagcaaggatctcgtgccactcctccccacctctcctgggtctgcacccagtgctctgtcatcctggtagactgtagttggggtggccatcaccccattggccaggacaatcccagttactcctattgccctggcataattgttattagcactctctttttattctgaagagctttggtctggataatatgttacatagcaatttacctgtcggaatgttttctccaccaacacacctttcttaactgttcagttgcagcgtcagtgtaagcacgggacgcagatccttgcatagccccgtgattatatgttggccctgtccgtggttcccagaggtcattgtggacaccttgtaggccatgtacttgttgtccaaggtaaatggatcacacgtgccttctgccttttaccttccaccttcaatcatgttgaactcgaatctgcatcagatacacaggtgagtgaatactcaacaagagagaagaactctaatgtattgaagcctattaatggatccataataaaaataattatctgtaaggttaaggaagatattcagctactcagtagtaagtaatcactgaaaccttttagagaagctcaattcaaaattcaaatggggtgaaatccatgaacctctttatttactcttaatactagtaaatgtagagaaggtggcaaagcatagttcacatgaattattagaactgacattcaagtgtaaataagccttttatttataaatgtcatcagtattctgttcaagtgtgtcatgaacctgtcacctcatgacagacactcagcaagtgtttgttggctcatttattcgcagaacaaaaccatttctcaggctgcatctgcaggcagcatcgcaggtggtgatgaggtcaggtggggatcagacacgcctctcttaaagcctggctctgccttattagctcttgactttgaacagtcccttcacctctctgagtttgtttcctgcctttgagtagggatcatagcaaccaatcccctagcatcattatagtaccgcgtttaaagtccttatcacagtgcccggcactgagaaagctttcaatctttatttttacctaaaaaattcatattgtgcttattatgtgccaggccctgttctaagcgcttagcatatatcaattcatttcatcctgttaacgaccccatcgtataattttctttttgagacagagtctcattctgttgcccaggctggagtgcagtggcataatctcagctcactgcaacctctgcctcctgggttcacacgattctcctgcctcagcctcctgagtagctgggattacaggtgcatgccaccatactcagataatttttgtatttttagtagagagagggtttcaccatgttggccaggctggtctcgaactcccagcctcaggagatccacccacctcagcctcccaaagtgctaggattacaggcataagacattgtgcctggccaaccccatgatataaatatagatattagtattgttcccattctacagatgcagagctgacacatacagagggtaagtccctgttcagagtcccacagctggttaccacccagttagcctggctccagactctactctcttcatgctgcactaggctgccactatggtttgaacgtgttccctccaaaattcaggtgttgaaagttaacagccagtaaaatgatatttggaggtgggggcctttaagaggtgattaagccataagaacccctttttcatgaatgagtttaaggccccggaggcttcacacagcagtgtttgtaacttgctcttctaccttccaccaagtgaggacacaacttccctccccaacagagagtgcagccctcaccagacaatccaacccaccagtgccttgatctcggacttcccagcctctagaactgtgaggaaataaattgccattcttcataaattgcccagtctcgggcactctgttttagcagtacaacatggactaagatagctgctattccatttttcaacattgctggagcccacatggagaattaactagagctcatggaggccgaaagcccaggagctgagtgagaagctccacaggtggtgtcttggcacagacttgagcggtacagttactgctaccatgacccccagcaagctgatccatagagataaccagcagccagctcattccatcttaaacccagatggatcctgaattatcttctattacttaaaaaaaagaaaaaacttatcttcattttcccttttgcactgatacgaacagacgtggagagaagatgcatccaacagtaccatatctccagataaagaagcaatgctgaatcattccttcaaagtgaaagtgtttcaaagaacctgctgcttaattcaacctttacttcagagatacactgagtggaaaatcataatttagtgatagcttgaaggacttcctgaactcactagggtacgagtaggtgggggatgggggtctgttacgggtttgtgtcccctcaaaaaatacatgctggcattctaacttctagcacttaatttgaaataggatctttatggagtaatcaagttaaaatgatgtcattagtgtcggttctaatccaatactactgctgtccttacaaaaaaggggaaaattggacacagaaacagacacacatagagggaagataatttgaaaagacacaggggccagttgcagtggctcacacttgtaatcccaacactttgggaggccaaagcaggaggattgcttgagcctaggagttcaagaccagcctgggctacatagggagacccccatctctacaatatattaaaaaatcagctgggtatggtggcgcgtgcctgtggccccagctactcaggaggctgaggcaggaggatcacttaagcccatgaggtcaaggctgcagtgagccatgttcatgccagtacactccagcctgggtgacagatagagaccctgtctcaaaaaagagagagagagagaaagaaagagggagagagagagggagagagaagggggggacagagagagagagaagatgaccatctgcaagtcaagtacagaggcccagaacagattctcctcacagccctcagaaggaaacaaccctgcaaagaactcatataagctggacagtgagcagatgctagacaatgggcagagacagggagctcagtgcccccaggcaagaccagcagaaccccactcttggcataagagggtccacatgctctgagtggaggcctgaggtcgttcatcaacagagcagccacttcaggccgagggtgagtggtgcctaaactccctgcttcccacagaggaagggccaagccacacagctcagcaaacatccatttcccttctccttcctcccatctgacttgctgctgactgaggagaccctgagagagtccccactctgccactggggtcacctgcccactgaagccaagaaaagtcccatccagctcagctcccctggccagccctgaacaggcaaggaagccccttgctctagcaattctatttctaacccccgccccctcgaggttgacagtcatcaccactgaggcctattttattaaaacctgggacaggggtatgttccccttccacaggttcccttccacctagattaaccctttgcctaattggcagaggtgtagcaaatgaaggcagttgaacctgagggtgctaccctgaaaaagcagaagtccttccctgtatattcttttattattattattatctttaaagacagggtctcactatgttgcccaggctggtcttgaattcccagccacaagagaacctcctgtctcagcctcccaagtagctgtgatacaggtgtgagcccaccacgcccagccttccctgtatactcttatcgttgtccttgacctcaagccttcccttgaaagtaactataggcctatgtaccccaaacctctgtgcaacctctggtcacttacctatgaacactccactctgcccccttaaatttcactcccctatatgctcagtgatcgccattctggggctggtgccgtggaaagggatatatacgaggatcaaggatgatttgcactctgtaaaatattgcatttatattccacaccagcttgaattaaaccctccagatttgtaggaattacctttcttactgaggtttgattacttctatgattttgatctaccaggagaaaaaagaaaatgtacaagatataaatttaaaaaacagaaaaggtagctccagatatctgacaatatttttcttaatacagaacatatagatcctaattgccttcaaacagctatcgccctgtggatgaaatagagatatctttatttttaataaacaacaagaaaagaatcctttatgcggtgttcgcgtggaagcaccaaacatcttgccatgccaaggatcaaataactttattaattgaccaattaaagccttaaccattcctactatagtccaagaatattcaataacatggggaaaatatttgtacaacaatgttaaggggtaaacagtagaattcagaattatctattacataatatatgtataatcacacacaattattctgtaaaggcacaaaaaatgaaatactttaaataatggtcattatagctgaatgatgagttccaggcaattccagcatgtttctgtattttcccaatttattaaaataagcttatattacttttttaatcagagaaaaaagttacattgtatcttaaccatttaacaattatatatctactttataagtatatgaatatccaattaattttacataccaggctgctagcccattaggaaaattttataaccaaccccaaaagttattacaaactgtgtactggaacccatagaagctcaagatatacaactgcaaacaaaaattaaagaaaatatatgaggtgttatcacttcagcaaggatagtttttggtaattgattctgttttagtgtgccactagaaatatatcctcttcgtttatgtcctctcttgctttctctgagtgtataaaatgacagcttatgcggaaatcaagtcgaggtcaaattaccaatattctgtaagtggctggaggtcagaattacctcctaaagagccctgagccccagaatgagtttctatttattcagcattctacttcccaatctcagctaacaaggaaaaaaaaaaaaaaaaaggagaaaggggcaaaatgggttccaaactcagggttcagcctgtgttttcaaatgaccaagaaaaacaaaggcatatgcaggcacaaccagacagagtacagggtagaagtcccttgtatttgtaaaggcaaatgtttgattagttctattcagcttgaataattctagttgtgtgatataagaaaaagagaaaaaactgtaccctggcaaacagctaagaaatccttaatgggctttgagggttccctatattcattatatttttaatgtaacgggcagccaccatgtgccatgcatactgctagaaacataagatgccatgagaatgtggccctagatccttggaagagtggggctacttctttcccaattgttgaatctttttatgcctatttttggttttaatacatgttatggaagcataatcgtccttccaaaaatacttggtaaccaacattggtttaatggtgtataaaatttattttggctttaacaaggcatctggatcacagattcctataaaggttgcaaagtcaggccccaagtgatacagtccatgggacactgcctttcccatccctatccattcctcctgctcctactcccagctgccttgtgtgaaaaggtcagttgtactggtttgcccaggataatgaaatgtcactgaatgagctgctataacactaactatttttactgcttttgcatgttcctttctacttttatctcatctttgaaagatgttttacgacatctttgcaagatgaatggaaaaggcaatggggcatgcactgaaatgtggactatgctaaagctttgcaactcaagaccaaattccacatagatacttcctattcacttccatagtctgcttgctgctttccctgcctcctccaccctatcccaccccaaccaattcagatggacttcaaaaattcaagtccagtagggcacagtagcttataccagtaatcccaatgctttcagaggccaagtcaggagatcacttgaggccaggagttcaagaccagcccaggcaacacagtaagaccctgtctctacaaaaaatataaataaataaaaattttaaattagctgagcatggttgtgggtgcctgtagtcccagctacttgggaggctgaggcaagagtattacttgagcccaggagtttgaggttataatgagctatgattgcaccacttcactccagcctgggtgacagagtaagaccctatctctaaaatgaatgaataaatgaatgaatgaatgaataaataaataaatggattaatttaaaaaaaatcaaatctgataatgatattacctggcctaatcctttccaatggttccatgtcacttaccaaggacagtcagaactgctcatgcatattccaggcctttctggtcatccctgctggctccgtccccactcctgcagccaatgtgacagccccacacctgtgcacatgcattccccaaacccgcaccatcctcatcccatctcatcaccagaagagcaactcctatctgcacaagcatcccatcttccatgaaacatgtttcttagaaaaatgtttaattaggaaagaaatttaaatcagtaccttctttgaagaagaccggagggatgggtttggccctggagagaaagttatacccaatcttagagaatcttaccctgctttttcttttattcagtacccagtaactactgatgaggtggactctgtaccacacattgatttcactactaaagccccaggagaatagacaagtcctggaaccaagcggggctggcaagactttatgggaaaatgtgcatagaagtaaaacatgcaaacaaggtattttgagtccttgtgaaatatacttctgcagaagtatatcttccactttcatcactgtccccaagaacgtttggggaataaggtggccacttggatagctaagctgcaaaaccatcagatgatacatgtaaatggcaggtttaagagaaagaatagctcccagtccagcaatccacccatggggttggattaccatgtcgaaagacaaaatgtgctccttgtaaactagagtggccagccatggaatctgcccagcctgtgggcaaatgttggcaggccccatctaagcactgtgcagggaaggggctggcccaaggactccagctgcctggcccaggggcagctctatctaaatgaaagagtgtattaatttcctagagctgccataacaaattagcacaaactgagtggttaaaaacaacagaattgtatggtttcacagttttggaagccagaaatctgatatcaaggtgtcatcagggttggctacttctacaggctctgagggacagtgcattccatgcctctttctagcttctgggggctgtcaggaatccttgacactccttggcttgtagcttcagaactccaatctctgcatctgtcttcacatggccttcttttcttctcttgtaaggatatagaatttgtaaattgacactggatttagggcacacctaatcaaggatgatttcatcttgaaatccttaacataattacatctgcaaagactctttttccaaatagggtcacatttatagggttcaggtggacacaccttttgagtggctcaccattcaatccactgcagaaagcatacattattctgactgaacctttgccactgatatccccagttctgaatccaagctgatcacacttctttctgattgtgatttcattccccaggtaatcagacctgcctggcatttttgagaatccaggctctgtgcagttacatttcttgtaaaaaatcaatggattggagatccggttttacacttgagtctcatgagagaggtgtgtgtctgtgctagagagagaaacaaaaccatctcttaatgtgttcagccaatcttctctgagcctgccagcctagggccaaacccaagcctggcaaattctccaaggtaagccatcctgggagggccctggagacactgcctatctgcaaaagaccctctgctatgcgtggccaagtgaggaccgagaatcagtgcgaactagagcttctcaatgagccagtagtcacccccgatccttccaccctatgtctgtgctgaccaatggggtgcacagtagtgtgcactaatgatgtgaccccttggattatccttttggaagatgaagagtggagccagtcaagaggcagaagaagagataaagaagaaccttaaagaccatcctgactccccatgaactgtctcagattgagcgatgcccactgttcaaacacaagtgtgaccaacccatggccaggtagctgctgcctgagaagtaagggccctctgccctggaatttcacctgcagcctctcctccccaaatacactctgccatgtgtcgttgaacctgaaatcatagtttctaagcctctctcagctactgtcaaaaaagccaataggaatagatctacattaagactttttaacccattttgtgttgctagttttgtaattgctgttggtgtttttacatgatttccaaaagatctggcttcctggagaagctggcagttttccagtgatcaaaactattctgtgataagaaaaggattggccgggcgcagtggttcacacttgtaatcccagcactttgggaggccaagatggatggatcacttgaggtcaagagctcgagactagcctggccaacactatgaaaccccgtctctgctaaaaacacaaaaactgccaggtgaggtggcaggtgcctgtaatcccagctactcgggaagctgaggccttgaaaccaggaggtagaagttgcagtgagccgagattatgccactgcactccagcctgggcaaaagaacgagaccctgtctcaaaaaaaaaaaaaatgattaggaattaagattaaaggtcacaatgacactatgtgtgtgtcctcagggaagacatttcagcagagagataaaagcttccgggtgctttcatctgtgagtttccaacaaacctgtgagcctccggcagttgtagaaattctcagacgagatatgaactcatttccagacccacggacattgaaatagggaagaaggacctgatgtgaaaggacagaggtaagggccagtttgtagcactagagccaataactgggaacctcataactccaactgagtcatcctggctcatgcttctgaagttaatttaacttaaagaaatatgtttttctttatggatgaagtgcatgggtctgtgctgggtgtcctgcccagcttcccttcattttctgtgccaaaatcagccaaaatgctgtgtctgtccatcacttttggccaatcaagcagaaatgcaggggctagaagctctagcacattcctgtcccatttcctctctgtcccccatgataacaacatcagcaggagattgtccaaaactggcagtggtttctggagggaaggaaatggcttcctagtgggaaggatcagggcaaaggctatgcatgcttttgcttttcatgtcagacccaatgcctctgtgccactgcccgatagaaaagaaagattgtggaggacgtaagtgctagaatcatcacatgaacatcttcagggacaatgttctagaggctcacctctatggtccttcagatgggaaatagcaatatcatttcaggaaatatcaatgaatttaataactaaacatttcctgtaaagagataaaggaaagaatgacacattcagctggcaaaaactttggtgtctaatatatgccaactcttccttctctaaaggcttcaaaagtcaaggcccatgtgaatacagaaacatcactgattgagatgagcatggttattcaatatacttctgccataatgacacttccaaatgctatctaagagtttttctgcaaggagtttggaatcgctcatgtaaacccattgatatttttgttacattgcaaggtttttcccctaaagtaaggatcagacaacagccttcaatgataattttttaaaaagcttcctgctttttttttaatggaagttttctttttcaaaggtgaaggatgttgtttctcatgatagctttgttgccaccaacagaaactcaaagtagagatctagaggtgaatcaggtaggattacctacattgctgttcttggaacgcagctccacttatgggagaattgtcaactattttaatattctattttccaggaaaacatagtcccatgttcaacagaagcccagaaaattccaaagcagacaatcaacaaagcagactctgtcaccaggcaagatacaactacatctgggtcaacaacatgaagaaatacgttatcactgtgtaaatacgaacagttccaggaaacagatctttgcattcctgccttttgtttcactgaaaccaggacatggagctcatgcttccagacaaatgtcaagtctactttgaccctggctttccccaagtacatgaaccctccagggaggcagagagttgcctggctgaaaccaaagaatcttctggccacccccaaacctgcccctggcaatggcctatacaaagtaagtctgagaaatgtaatacatcttaggaatgcacctggaatatagcaatattatatccacccagggaaaagtcttcctggggattagagtgggctctgaaatttgaggcttctcaagctttcataattgttatcccaattaatgtaactgcagacaccattcttatattcccaggtacaataatgtcccgttcctttgaagctcatcaagccatttgcttcaacacttgaggaggcaagccccaaggttaacagccctccacgtgagcctctcatctgcctgctgtacaaatgtgttttctttgcatttcagtcatgccctgaccttggagaggacgatgtaaaggggaatgcctaattaactttccatttataaaccaattattttactattggcaccttcattctgcaatcactgacataaaatcttttacaaaacaaaatgtaataaatgagaaatcgattggattttttttaagtttgctttgaagtcagccattaataagaaatgtcctttaataagagagatctgtctatagaagttcctcgacgtcagagcccagctgtgcggctgctggaggagacgaagccgcattcaatcaaggctttggaactcttccttgttcatctttaactgcaaggacagaggcgtactatttttctttttttttttttttttttttggtagagaggggggtctccgtaggttgctcaggctggtctcaatctcctggactcaagcaattctcctgtcttggcctcccaaagtgctgagattacaggtgtgagccaccacacccagccagtaccagaaggactgcttttctccttaaaaaagagggaaagaatgttttcacatagatcttcatgtgctaaaatcacaccaaaaactcatgcaaggtcaatgaagaacaaagttctctgctcccaccacagaatctttgcattgactgtcactgtcccggacactctttcccagaggtcagcatggttctctcctttatcttcttcagttcatcatcaagtgtcaccttttggtgagaccttccctcaccaccctactgacaactataaaccagcagccccgacatctgcatcccttctccaccctgctttcctccatagcactcccatgcttgacattctttacattgggtctactcctcccttttgattattccacgcctccccaccatgagaatgtaagctccatgaggacaggaagatcccagcaacacctagaacagaagccaacatagagccagcactcaataaatataatgagacgtatacatcaagtatttacaatggaaagtcaaaataccgctgcccatcatgagcaagtcattccccttctctccacaaagatagacagtgtggtgaagccactgcccaggtgagtcgagaacaaagaagagagagaaaaactgctcctgttctccaacatcagatacaaagcaccgtgccttccatgtcacctgggagcccagactcaggcagctaccatgatccctgcccacacctccacctgaaactccagagggaagaggggtaatgttccctctggcttctagcttgctcgtggcttgctggtgagttgtatccagggccagctccatgggaactgctgtagtcacacccagggtcccatactcagaagagtcccaagcttggtttcatgctctgctgtggccgtctggaaattctttccaattttacctttgaacttgggacagtggagcatgcatatgagcagaagagattcataaaaccaaaagaaaaactttatattttagtacctttagcagcatttttttctctgctttttcaacaagcagatccacattttctttttgtactgagccctaaaaattacgtagttggtcctggatgcattcatgttctttgtggagggaaaactttctaaggtggagaaaatccactctgtctaatggttctgttctcccaacttgatagaggtgtggccatctctttctggctaacaacagcaacaacaaagcttagattctaataaatcccaaatcaaggagaataattgagctgattagttgctttgaaggaaagaaataatacagaaaattcttttataaaaataattactggaaattttaataagctaatttaataaattttcccagctaataagagtagctgggaaactacttttgttgttgggaagctatttttgttgtttggaaacttcagaaagttatttactgaagtcatatgacaatttctactacatgtgcaccatgtaccaaaagggaattgtttaatccacctcttcccaagggcagagtcaggattcgtggacataaaacccaaggctttacaaatactgaagagaacttggctattcaacaattatgtgtattaacaaaaggcaaaatgcatcattaattctataactttctaattttgagaaaactccatagactcacaggttaaattaaaatagaaaaaatttaaatgaattgctaaaatgtaaaagttagatggatcattcgtatgttgaatgataatgatatccaaatttgataaatttcaaaagatcaaaaagtttaacttcatataacttgtgatggttaatactgagtgtcaacttgattggattgaaggatacaaagtattgatcctgggtgtgtctgtgagggtgttgccgaaagagattaacatttgagtcagtagggtggggaaggcagattcacccttaacctggaggacacaatctaatcagctgccaacaaacaaaaagcaggcagaaaaacgtgaaaaggaaagactggcctagcctcccagcctacgtctttctcccgtgctggatgctccctgccctcagacatcagactccaagttcttcagttttaggactcagaccatatatatatatatatatatatatatatatatatatatatatatatatatacacacacacacacacacacacatatacatatatatacacatatacatatatttatatatatacacacatatacatatatatacgtatcttctattagttctgcccctctagagaaccctaatacaccaacagagtcatattttcccaatttgtcaatccttccctatttctctgtctctactattctataaaagataatacaagacctaggaaataaaatcaaacacctacagaagtcagacatgtaacataaacatgtgaaccaggctgaatacaagacagaaggggtaagacagtgggactgcatgtgtaccttctaaattttttttttttttttttttgaggcagaatcttcctttgtcacccaagctggagcacagtgacgcaatctcagttcactgcaacctccacctcctaggttcaagcaattctcctgcctcaggctcccaagtagctgggattacaggcatgcaccaccacacccagctaatttttgtatttttagtagagacgtggtttcaccattttggccaggctggtctcaaactcctgacctcaagtgatccactcgcctcagcttcccaaagtgctggaattacaggtgtcagccaccatgcctgcccactttttttaatcaaggaatcttctgaatttttaatcaagtcaggatcttctgaaaagcataaaccagggcaggattcaatgtacaagtaatttattaagagaagcgcctatgagtctcttattcaggctgctataacaaaatatcatagactaggtggcttattaacagctgaacatgatttctcacagtgccagaggctgaaagttggacatcaggatgccagcagcagtgttaggttctggggagggctctcttctgggttgcaggcagctgacttcttgttacatcttcatatggcaagacaggacaaaagaactctctgagtgtctttaaagggaactaataccattcatgaggctccaccctcatgacctaatcacctcccaaaggccatcacattgagattagagtttcaacatatgaatctggggggcaaagacattcagtccataacagagacaacatgaggagcaggctactagagatgttagaccatcgtgtaggtctgacctgcatgaaggagagagggaaggaagcaaggtgaattagatgcttcctcaactacagtgcatttctccaggaagttctacaaggccagttgggaggcatcaagccacagtcagaggcatcacctctcccagaaacaggcctgtctgggtatcccaccttgctcagtcatgaaaagcaaggtctcgggccgatcagtgatggatttcaaagcacagcagctggggctgttggtcaacgatgccaactgcagtcatagatctgaggccattctcatatcctccatagtgcccaatagaatacacctgaaggctagcaatctgagcctgcctaggcccttgttaaactctcatgcttcattctctcaccaactgtcatctctccatgcctatacctcactaccgaccaaatgaaagtgtagctatccattccattcagaaacatggaaagaattcattccttgaaaaacagaccttgcaggacctgtgctaggagcagacacaacttctaaacaagctgtccttacagatctgttggaaatcagtcactggagctgccttcaggccagaaagtttgcatcaggtgttcaggttgttctgtttccccacagaggtcacaatgcccttgactgaatgtggctccatggttggataacttatgcaggaataaaccacgattaaaaaaataataacaaatgtttatgccagcttttgaatcataaagcaatttcccatcctttccttttcatacagaaaagtgttccccttaggaaacttccaatgatgccactgattcttccatggatgcaaaaaattgtgttagtgttgtattttcaaggttgagaaggaaaaaacaaaaacagcactagcaaaccgagaacctgtgaaaatatcggtggtagtgttgccacacagagagactgaaaatataatggctgcattccccaaggtagtctcaagttaccaaaatcattctgtggaaggccgagagaaaataaaggaaaagatccctgtaaatacggaagcagtgaagagagtagcaatagaagggcagccctttaaaaacaaaggaattataaaacatgaaggaagactaacagctaagccttcagaggaaccagaagaaaacaggcaactgccagaaagcccaagaaccctcatactcaacgtgttccccagaaaacaccctgccctaatgtgtgggtttgttgttgttgttgttttcaggaaatggaaaccccatttcttccattgtactcatcagaaacctatccatgtttgacaacttctctccttcactcctatacaaccacatcacccagtcttcttggtttcattttctcttgaatccatccacttctcttaaccctaatgtccaccctggtccaagtaaaggtcacattttgcctactctttaacgatggaccatccagctggtctccttgagtcaactcttgctccacacgcccatcattctctaaagagtcctcagtggtcttcttaaaacataaatgtaatcccagcactttgggaggccgaggtgggtggatcacctgagatcaggagttcaagaccagcctgcccaatatggtgaaaccccgtctctactaaaaatataaaaaattagccatgcgtggtggcatgtgcctgtaatcccagctactcgggaggctgaggcaggagaatcgcttgaacccaggaggtggaggttacggtgagccaagatcatgccaccgcactccaccctgagcaacagtgagacgcctctcaaataaataaataaattaattaattaatgggatcatattgttccactgtagtctaaacctctctagtgggttccaatccagttttcatcacaaaatccctcatgcttgacaagatcctgcatgtttgtaacccctccctctctaacatatccgccccatctcctcagtccctacgcagcaaccacacgggctttctttgggttcatcaaatattgtgctccatcttgcctcagagcctttgcaaatactgtcccctccacctttcctccctctctttgcctattacttcctgcatttcctgaagcgcagaagccagttcctcaggaaaacctttcctaacatgccctgcctaccccatcccagaataactcagtctctctctctctctctctctctctatatatatatatatacatatacatatatatatattacactttttatagcatggctgacatttttagcatatttgtagggtggtttgactaatctgtttttctgtctagacttaacgcaggaactatgcctgcctttaattttctcaattatttcacctgtggctagcccagcacctggcacatagatgaataattggatggatggatggatggatggatggatggatggatggatggatggatggatggtcaattgatccattgattgactgattgctaagtaccagaatattataaagccataagccagaatattataaatccataagccatctttccaggggcagaaataaatatcaaatgtagataaaggctaataggtaaatataccacttttttaatgttttaattgctgaataggtgctatattcacatacttcaaatctaaaagatgtccactgagaatatttgctcctgttctgtgtccttccactccatttttcactgcctttataagtaactagttcagtaagtatcttatatttgttgtgtttctttacacagatacaagtaaatgttattttcactttcttacacaaaagagagaatagtagacacagtgtttgacacattggattttgttgttgcttttgtttaaggtaacaacataccccaaagccctctgattcattccctaagagcttccttactcttttgtacagttccatggcagtccattgtatggatgcagcatcctttatttaacccttcccatcctgctgcttagtcttttgctatttgaaacaaggttctcactacatcatccaggctggaatgcagtggcacgatctcagttcactgcaacctccacctcccagattcaagcaattctcctgcctcagcttcccaagtagctgggattacaggcacacgcctggctaatttttgtgtttttagtagagacggggtttcaccatgttggctaggctggtcttgaacccctaacctcaagtaatccacccaccttggcctcccaaagtgctgggactacaggcgtgagtcactgagacccatagcattttaaagtaaaggttcataaaagttgaaaaaaggtaagttaggaggtggtggagtaagccttaaagacagaaatgcctgggtttgaatatgagttctggccatcatcagctatgtcaacttgagttagataaactttctgagcctcagtttcctcatctataaaatggagacaatattcctctagacatggctgaggatgaaacagaataacacaaatgaagcatttaacttctcttgcatgctctcacgcaatccatcacttcaaacatcacccatcaaggaaggctcccaagtctccttcttcagctgaaacctgccctgtttttccaggtacctgctggattcttcctcttttatgtcttgtatgcccccaatctttgttttgttttgtttgagacagtctcactctgtcgcccaggctggagtgcagtggtgcaatctcggctcactgcaacctccacctcctgggttcaagtgattctcctgcctcagcctcctgagtagctgggcttacaggcacacaccatcatgcccaaccaagtttttgtatttttagtagagacggggcttcaccatgttggccaggctggtggcctcaagtgatccgcccacctcggcctcccgaagtgctgggattacaggtgtgagccactgtacccagccccacatctttaaattacaaaatatccagaacaaaaccttctcaaaaatgccatttaaaactgtattattttcctgcacttcccatttacccaaagaccaagataactgagagttttcttctacccctgcttctccctttacccacactctcaattcagtcaccaactcctgataatttttttctcccaaatcttctggaatctgtttcttccatttatttccattctgacccagaacaggtgcccaaggtttcccaaccagactattgcaaaaaaaggggggccagactagtttgactgactctggtttcataacctttcaggacaacctctctaaccagtccaaaagtgatctttctagaatacaaaccaggccttgtttctcatttgtttgccctccaccttctgtgggtgggtgtctaaaggaatagcatgtaaaccatataaaccacagccttctcccaggccgcacctccagcccctctcctggcctctggccacagcaaacttctgccttcctctgggaaactctctctctcaagcctccttctctttgcacagggaacttttctatatgctgttcattcgctcattcattcagcaaatatttttaagagcctgatatatgccaattatcctttaactttaaaaaggatggtctggcatgccccagactacttaactcctagaaacttcgttgatgtaacagactcctgaatttgcatagggttgacctcccaccactggtacacaggtgtcttctaggacagtgtttcccaaccttgacactattggcatttggagccagataattctttgtttgggtagggggctatcctttgtgttgtagggtgtacagaagcatccctgaactctacccagtagatgccagttgctcacgtcaaccaattataacaaccaaaatatctgcagatgttcccaaatatcccctgggggttaaaatcatcccaggttgatgccctgtattagggcatctatgatacttgctactcccaggtcagtaagtccaattagcatgatgtcactaataggtgagacagagcaatgttctgcagaatgtcagcatgatcaagatccctgcagacatgcagatagtgaatgtatactgctatccttgccacggaaaggccaaccactgcagagtccccctattgatggaggttgacaagaaatcatttgccagatcagtagtcacatatgaagtttgagaaggcgtgttgctcttcatcagtaaatatagcaaacccagcacaacagcttcaaggggctatcacctaatagcatctgccatcatttatctggtttttacacggacacagtgggtaaactgaatggagatattatggggaccaccacctccttgcagctttgatgttcttgatgatagcaatcatatctgtacttcctcctggaatgccttgttattcctgattgccatcttgaataatggggaaagaacagtttccgatactttacttggcccttcccaccatagttccttactccataagtgggagttctgccaaccactaaatatatctaccccaattgtatatttggggacctgataaataaccacagggtagtttttggacccagtggaccaaatggacccattgtgaaacagacttggggtaaaactctatttatcaccagacttcctaaaactgccaatctaacgggacagggcaggtggggagggacaacataaggcatttaatattccttggtatcatttaagatcccttggtattgaagcagctatgttgtctggggtaaatacctagggtttgtcatctcacaccaggaaaatttaggacacagacacacatgaggcatttaggagcagaagtttaataggcaaaagaaaaagaaaggaaaacagctctctttctctagtgagagggagggaacttccgagaggaaaaggcccgctggcggcagatgcgccagattttatagtcaggcttgaggaggcggtgtctgatttacatagggcccacagattggttcaaggtggtgcctgatttacataggactcacagattggttcaaggtggtgtctgatttacgtagggctcacagattggttcaatcaggtatgatgtttacataccactggggaaggctggccacccaccctaatcttacttagcaaatgaaatttccccttggctgggtcatgttgtctgttccttactgtacacgtggctatcaaagaaaagggaagatggagttgctatcttgaacatgattggcacagctgccagcatctatgttggcagcttgattttacaggctgctctttgttagaaaatgatttggggctgcttttcattaaaggaaaaaccttaccgaggatttccgtaccctcactacctgcctaagtaatttcttcttaactccttatcagtatcagctcaaaccttgtatattactaatcctcaaaaagtctgaattgtccctattctctggcactagttacttggggaaatgggtgcaaattccttaaaggggaagattagaagaacacattttcaggtatactgtggaaaatagaagggtccttcttcaaggaagcctaagtcttcccctcaatccacacatcagtcattgcaataaaaaattgtagactctcactcagttttcaaatgtatttggttggtgcaaaaataattgcaattttgccattaaaagtcatggccaaaaccacaattacttttgcatcaacctaataagccagtttgaaaactttacttcaagccggttttcaaactggcttacatttgaaaactgagtgagagtccacaattttttattgcaaggactgatgtcaaccttctattctccagctttctttttattattattatacaatcttaataacatcctagttagctgtccttctgtctcatgcctaggaacaccaggatctcttaaccattgctacaaatctctgaaggttgaggcaccctaagtactattcttcagtgtttccaattataatcattatggccaccttgcctctggtggttacgagttgccttctagttttataattctggaatctcactatccccattgatataaagaagttcagttgcagccgggtgcagtggctcactcctgtaatctcagcactttgggaggccgaggcaggaggattgcttgaggtcaggagttcaagaccagcctggccaacatggtgaaaccccatctctactaaaaatacaaaaattagccgggcatggtggtgggtgcctataatctcagccaaggcaggagaattgcttgaacccaggagatggatgttacagtgagcccagattgcaccaatgcactccagcctgggcaacagagtgagactcctattaaaaaaaaaaaaaaaagaagaagaagaagttcagttcgatggaagtgtctacacccataacccctgcctacagaagacagacactaagattctcaaagatattagtgagcccttcacttgtgtactcctgctgcattcatagcaaaagtgtctcccagtctttttcaggaaacacggtgatgtggcaggttctcaggatttacatagtaaattcattctaacattcccaactccttgagccttaacccctttctcgacataatgccaaatatgctccagcatctccaccttatcaattgcagccgtcatcctatctaaatgtcatggagctgtctcaaaagactattaggaccagctccaggtaatcatgatgatctaacaccctcaagatacgctactacaaggtgtttgctaattcgtgcctgccagctcctgtaagcctttgacacatagactgttttctcctgcagcagggattgtacttcctcattgaagctgtgctcaggcctgactctggttgttagccaggacataatgagagatagtggggacagatctggagaaaaacaatgatcattgtgtggagcacctccaggtgaggtcatagtgtaatgcactgggaagacgaggctgttctctccccaggttgttgggaacagcttcggccagccaggaagcttcagggaattgggggctacaatattctcagccttggccacgcaaacatcaccatccaaggtcttggtggtccactctcctgtcaggtctttactttgacactggggcggtgttaaggctgtgcattttgcttcttttgcatttctgccacccttataatcagatcccaggtttaataaccttctgtcctgtgggttttagagatgagaacctcctctaaagtgactacagaaatactctggctttcagacagggcctccaggtggcaaatagctgccctgcacttattattttctttttgcaaggcttccaatgccttcaaaagttaccacccacatccaagtccttagggttattattgctccaaaatgcatcaagtgctccagtgtctgataagtcagtactttggcttcctcctctgcctcatcctaattagcttcagataaaagcttttgtaattgtgatgctacagaatgtcagagattgtcaccacccacttgctgctaccaaaacccatcagaagctctgctttctggggccaagtttccctggacagtagagccttgggcacacgtttacgtgctaagacttcactgacaagtgcaatcctggggaagcaggagtatgagggagaccagtgaggcaaggaagaggaagatcaaacatgagggcgtgggttactgagctgcttttttgttttgtttttttttttttgagatggagttttgctcttgttgcccaggctggagtgcaatggcgcaacctcagctcactgcaacctccacctcccaggttcaagcgattctcctgctttagcctcccaagtagctgggattacaggcgtgggccaccacacccagctaatttttgtatttttagtagagacgggatttcaccatgttggccaggatggtcttgaactcctgacctcaggtgatccacctgccttggcctcccaaagtgctggaattacaggtgtgagctaccgtgcccggcctactgagctgctttataacagcctggatgatggcttgatctcacataatgtcttcaggaaggtcacatggatgcttgcatctcagaacagtatgtggggcagggcatgagatggagaagggaaaataactaattagccagtcccttcctatccatcacctcctgctgggcaaaggtggtgacagggggttttagtttctccatgctttctagatgcatcccccgccctcttcaggtgaagcttcttctagccaattcgtactgcatggagagcaacttggcctgtagtacaggcagcaacaatggcagcaatgaattgactttgtgactgcaggaccagcacaagccatggctggggccaagccagccagtgggtaagagaggtgggcagctctgtggtgatatagaaactgagtcagagacaagccctaaactcaggcctcacatttgaatataaataagctcatttcagcacaggcgcaaggtgcagtgactggcaaagtcatgtgaagtcctttctgatcctttgcaaactcatgcccttagtttttggggtttggatgggttgcttttttgttgtttgtttttgtttgttttttttttgtatgtttgttttttttttgttgttagacacaaggtctctctctgtcacccaggctggagggcagtggcacaatcacagctcactgcagccttgagctcctgggctcaagtgatcctcccacctcagcctcccaagtagttgagactataggcacatacaaccacacccagcttattttttaattttcttttttttttctttcttttgtagagacagtattttgctatgttgcccagctgatctcaaacttctagcctcaagcaaacctcctgccttggcctcccaaagcactgggagattttgtttttaaaaaaaatgaagcagtctgggtgtggtggctcacacctgtaatcccagcactttgggaggctaaggcgggccaatcacgtgaggtcaggaggttgagaccagcttggccaacatggtaaaacccatctctactttaaaaaaataataataattaggcaggcggtggtggctcacacttgtaatcccagcactttgggaggccaaggccagtagatcacccgaggtcaggaaatcaagaacagccaggccaacatgatgaaaccccgtctctactaaaaataacaaaaattagccaggtgtggtggcatgcacctgtaatcccagctactcagttggctgaagcagaatcaattgaacctggggggtggaggttgcagtgagctgagatcacgccactgctctccagccttggtgacaaagtgagtgagactccatttcaaaaaataaaagtaagaaacaaagctacatcacagctaaaatgttaacatttccttaatgcattaattgaacctgagacattaaccacagattttcagggaattatgcctgttcaaccaataaagctgatgtagaaaaccagaattgttttaaatgatgaattctatcccattgggcacattctttcagctcactattgctattctgtcctgtggatttttgcttaattagctagacaaattgcacaaattctgcaattctatttttactttaactatggccaaagctccttttcagtttctcatagctttctacccttcagctgctagacgtccccagttataaggcaactcgaagtgtgtgcaagggacagaagtttgtatatctgaaactacaatttggtaaaacacaagacaaaggggggaggagagagggagagagagagagagagagagagaggaataagagtcctatttgcacttaccatgagccaaattgaatttgggggacttgaaatattttaattgtaaaatgtactatatcgggcttcattacagattatgctcttaaaggtgcattgaaattgaccatattgtattttatctaaattaagaaaattctctttaaagaccctgcattgaatctttttcatgctaagtatcattttgtgatatgaataattgcaactgattttatctgttgtatatattcacatttatccagaaatctttcaggaggctatccttgtatttcacttgtttggtttaggacttagtatccaaagcgtgctttgcttttatattaaatgaatagtacagtgcaatacaagtcaatacagaccaaaaacaggagcaacaacagaaatgtattcaatggtatgacagtaactttttcatgccaacaaggtcctccttgtacctcctttgtacccatttgtcctgggtacaaggtacacaagacaacgcacggtcgctatatttttctggttttgcattcagtaaaccaacattcatgtggcatttgaataccaagacagggcaaagtttagacagtcacctttcattttcatctttcattataatgagacttgacgtaaccagctgtctttgaagtgcatgtcacgaacatgcccatttaactccctgctctgccaaaggcctacggaggagcaagactgattgtcttgatgtacacagagccagcacagtgttcatctataatatgactatggagaagggagagacttttaataaaaatatcctgtattccaacatgaatctttcagactggatgagaaaggatttcttagacacccaagctattaacacttggtggccagtcacggagtacactgccaggcacacaaaaggctccctcaaaaccatgcattgctttaggtccttaactactttccaatttattcattttctgcagtacagtaggaaagaaacttgcatagatgagaaccacataggaaaacacgctagggatatgactttattttttaattttttaacttaaatcttattttttaattaattattaaactattgattattttttaattttacaaactacagccaattgtataaaaataatttgttcaataattcattttttctccactgatttaaaatgcctcctttggcagggtacaatagctcatacctgtaattccagcattttgggaggccaaggcgagtggatcacttgagtctaggagttcaagaccagcctgggcaacatggtgaaaccccatctctacaaaaaaaaaaaaaatacagaaattagtggggcatggtggcacacacctgtagtcccaactactcgggaggctgaagtgggaggatggcttggccctggagatcaagggtgtagggagccatgattgtgccactgcactccagcctgggtgacagagtgagaccctgtctcaaaataaaataaaataaaacaaaataaaatgcctcctttattacatgccagtttcccatgtataatcctcatacagttgaacaccttaagagcaaagactgagatttcccaaagaagcagcaattctgcctcaagatacagaaaccctgcccaagtttccagcctgcctggcctggcctgcagaattcagaatcaagactgcaatgtcaattctttattttattctatttgtctcttggtctattcctacaccagcatctctctcttttaattagtgaaactccattgttcctgttcacctcaaggaaagtgaaaatctctccattattctttttcaaagtttcttgccttttctactgcctttgctttttagtttagaataaaatctgcaacagtatcatcatccacattcagcctcaaaggaagttccttcccttcttcctttacccaacgtatactaattaagcatctactgtgtgggggtcactgtgcccaggggctgctctcacagtgatcccaagtgtcacacagccacagtctaatagactacagactagttaataatgactttctggccaggcttggtggttcacgcctgtaatcccagcactttgggaggccaaggtgggtggatcatttgaggtcaggggttcaagaccagcctggccaacatggtgaaaccctgtctctaccaaaaatacaaaagttagccaagtatgctggcatgcatctgtagtcccagctactcggaaggctgaggcaggagaatcacttgaacccaggaggtggaggttgtagtgagctgagattgcactactgcactccagcctgggtgacagagcaagaccctgtctcaaaaaaaaaaaaaagaaaagaaaaaaatagtgactttccacaatgcaatgtaacgggagaaataaaggatggctggatgctcaaaggaaggactgtgtccagatttagaggttcaggaaagatttccttaagaagtgagagctaagcctccacatagcaaaggagttggccagaaaatcagaaaggggagaatatttcaggcaggcagaaggtagtaggtaagagaaggtaaactcagccaagagactcaatggaaaatgtccaatgcgactggaaggtagaggccaaggccagaggcctacaagctgtattagggagcctgtattctttccaaaagcaatgagctgccttagaaagggtgctgagcagaagagagtaaggaaaatgtgtcaggatatctaatagtcattgactacccaaatgttcccccacccttcccagcacagttttgctctgtggtgaggcagtgctgtgtgagtagctctggccaaggaacagtgagtagaagtgatctgtgacatttccatgctaaggcttgtaaaaactgttacttgaccaggcacagtggctcacgcctgtaatcccaacacttttgaaggactaggtgggagaatcacttgaggccaggagttcgagactgcagtgaactatcattgtgccactgcactccaccctgggtgacagagagcctgtcctccaaaaataaaaaataagtaaatttaaagctggtccttgaccttccacactggctgccacagcaatctggaagccatgtgctgagatggtggcctccatgcatagaagcaggattcccatgtcaccacatggacagctgccctggaggctcacccaacccacactggacttttcatgagccaaaaataaatctttctcatgtaagccattgaggtatcaaggtttatttactgcaacaggagcaaactgactaataaagtttgcaaacatgatccagtgattgggatcaaagtttccaaagctctatgacaacattaaaaatccttgtcatctctagcaaaaaaaaatgtcttcctccttttgaaagaagggactaagataaactcatgtcactgctttgccttttcaggggtttacaactactttattgatgagcacattgctctgctgagcagatgtgagattcctcctgcttagagaactgtaagtaatctattatattcctctctttctttttccttcttcatggttccaccttccttgatgatgtatgtgcctctttgttctttcaggcctggcccttctcccatccgtcttcagcagtgagatggtcctggtggtaactcaaaggtggccatgcagcaactacagccacaaacattgtcttcacgcccagccctgctgccccctcccagggcaggagagtctcctaacactgctgctcctgcaggtggaggaacccgagatcaagccttgcctggtctcttatgctttgcctgaacttggatacattccctgacttctctgcgacttagtttcttcttctgcaaaatgaggatgataatgcttacttgagggtcctatggagatttatagggagtaacaaatgtaaagttcccagctcagtgtccagcataggataggaatctcctaaatctgttttcctttttctcttgccctttcttctgaggaagaagctgaacctctcagatcttcatagtttaattccacatctatctatctaggccttttgatgggtacaactccatgcttgagtgtagaggatgcaaaagatggaacaatctagctggggaggcaataggtactcatggggaaaggttaacaggcttattaattaaatgtgtaaatgcccaagtgtttaatatagaccacaagtacttaagaagttcaaagaaagaagagacacacctgggctcctgggattcaggctaaggattcagcacagggaaatgggaagatagaggcccttcccaccttccttcccaaggctaagtctccccactgctgagttggccactctttctaatccaagatggtcatcaaattaacaatgagggagatggagagagattttctcaccagctcagtccactcaaaccagatacgtccacaggtactatctgatgattcagaaaagtataacaagtatacttttgaatgaattggcccaccaagcacatgctcttggaaggcctgctcaagggtagatgtactggttgtacttcacattgcaggttgggactttgcctggcacaatttgctcaggtagaccctaacatctgcaccagtcatacaaagaggattcccaaaataaaataagagattcccattgctctgtaaatattgcacacaaatgccctcaaactcctaattctggcggcattagctccttattgataataacaccttcagctggttgaactgtttacgtggctatgaccagcacgtataatttttgtcaaaaatctaacaaagctccagccaccattcccaaaggagaacatggatttttgtgtgatcctatcatattaaaattgcaaaactatgcaaactacgtaatatatccacttacctaagattctaacatcaaatactgcaaaggccttgatcaaagcagaacaggtcaatagtgacaggtcagatattttgtttctgcttctttccaactcctcaggtacatggaaatttgagggactagaaggctcaaattcagattttaaggtaggcaggacccaatagctgctaaaaaactaacaagttcttaagagagactggttaatagatgtatagtgttgtaaacaaaggtggacaacaatcccacagttctttctccatatatgaacaacatatggaccccacatgttcagacctggaaggtggccgagtagtgataagtgttcttctttagcatcagaaagcagtgaggacggtcaggagacagcgagacagagaaaacactagtgtcatccttaaatgttgtaagagctgtagtgtgaagagaactaggctttccctatagttccgaagagcagcactgagaccaacagataaaagttaccagaagacaaatttcacctacatgtgagggagacctttcaagtaattaaagccattcaaaaactggaagagccacaagaggtgatgagcatcctgtcactgacaaattcctacaaaggctgcctttcactttcttggctgcatggaaattcaggggatcatgagattcttcaggcttcgaagtcaggttttgtagagaatttccacatggacagagaagttaggttgggtgtcctcaaatgactgcccataagctaaccgaaaattcttacttcctctgataatattttcttccaatacaaaggctaagaatttcctgcatgcagggcttaatacctaggtgatggcttgataggtgcagcaaatcactgtggcacacgtttacctatgtagcaaacctgcatgtcctgcacatgtatcctggaacttaaaataaaatgaaataaaaatttttaaaaaagaatttcctgcttcagattatcagtgagcaccctaatcacatcattatcgtttctagtctttttcccaacggacaggtccggtgctcaatggcatttgtgtgattctttccccaccccatcccacagtcacaccggcactcatgctaaaagctgtccactataaaccccatcatttataatgcaaaaagggaatcattgattttgcgctgatgagtcaccataatgcttttctcttatatgtacttaatcgctgtggtttctccgaggatggaaagctttcctttctgtgggaggatctaaatagctctctaaacagacaccagctgggcaaacagtgcagagaatttcggcacaatgtgataagagcagccgcacccgcaacccaggtcgcttctcagtacagcagccaaattagaaatagctactgagcagatccttttgatctaaccgtaggatgcatccatttctttctttctctctctttttttttttttttttttttttgagacagagtctcactctgtgacccaggctggagtgcagtggcgcaatcttggctcactgcaacctctgcctcccaggttcaagtgattctcctgcctcagcctcccaagtagctgggattacaggcacacgctaccacacttggctaattttttgtatttttagtagggacagtgtttcaccacattggccaggctggtcttgaactcctgacctcaggtgatccacccacctcagcctcccaaagtgctgggattacaggcgttgagccactgcgcccagcaaggatgcatccatctcttaagagaatgctacatccagtttcacggttagtcgccaaacctgaaaattatccatgtatcatggaatcagaatgtgtctctcccaggatgggaactggacagagctggtacagcacccaggcaaggaggaaatgataaaacatcagccatgggatgggggtaatgaaatgcttccctttagtcctcatttcggcggcagcctttcccatcctgcccggcatcttcatgctgtgctaatctttgtacaggggtaaggccttccgtgtttatttcttccttttgtccagaaggaagccacagtagtttgcaatcttaaacaggaaacacagaactcagaatccaagaaagcatactttgcctctctctctcaagaagtctcagcaactattgaacaagctgtgcccatccaacattacatacttgtttgaggcagaatgagatagaatgaaaataatgaatgaatgaatgaatgaatgactcctgtaagattgcagactgttgatagccaggtagaaatcatccctttaggaatgttctagcatgtgcatgggcgtagatgtgagaagaatcacagcctcctcatgtgaaacaagggctggccaggggtcttttttagaggttcctcggggctggagttaggacaagtatttccagctcaatgcactatgggaaactgaagctaaaggaagagacagagcaaataaggtctttaacgccaaggccacctagcatgtgactgtgaggacagtcaccctccaaggcaggtcacatgaacttagagcccacctttttaagggcaagactgtttggcttcttgctctggtggaggaatgaagccaagtctttaatttgcatttcccaattgagtggaatcaatctcttttgtatcctgaaatactgtgattgccttgattgggtagtatctttacatgctgaattccaaaccgccagctacagacacacattctttatttgcaccttgtctttatatagcctgggacacactcagaggagggtgagccacattctgaaagggctcacagcgtacctggttttgcccacattagtgaagcaaatgggtccacccagttgggtccacccagtccaagtctcaatgttgagccttgaccagaggttaaatacaggatgtggtgaaaacagctgaaccattaaaccccctaggaactgaaaaccacattatatgtgttatttgttctcctaggaattgacgtgggtatccaaatctaagaagtatgtttagcaagatactgatatcaacaaagggatgaggcccagggcattgttggggcaacaaaaagctccccttccttctttctagaaaagaggaaaggagtcatgctgggtgcagggttctggggaggaagggagggaggcaagcagggatttgttcttggaacagaaaagcacaagcaagcagagtgggcatccgcctcaatgcatggcactgaccatcctgcagacacaggtgctgaaggagcctcagaacgcagctggcatcataggtagcactcacaggcccatgcagcctccccaagcctgcttccccatgtcccttcatgccctgcccactttcctaaccttgtcccccaggagtttccaccaagaggaggagcagctgagctcacagtacctggagttctgttgcacacacagctgtgcaggccctgcatcaccctcgggccaggacaacactggggctacattcacccagctccaccacctccagttgccccatgctgagaaatggcttcaaggagcagccccatcctgtggcctggatttctctaggtgggctcaactcaccctcttccatttgtcctgctcgtttctgcagaggctacgctgatatgtcactttctttttttcagggacctcagtcttggcctctccttttgaactgctcaaggtccccttacatgtgttcttcattgaggcttttttggcagaggtttgcttccccagagattaataaatgcccacagcacactttgctgaggaagctgggtgacactaggagagctctctgtgtctctctaccctccatgttctctagcaaccacattctccatagcagtctgtgctctgaaagttacaggagaggactcgctgggaaaaaccatttttccaactggactccaagttggaaactgtcaagtggaaacataaatacaatgaaaggctcaggaagaaaacgcaacaataaatctcaagaagcagagaatagaatggtgcatgtcaggggctgtggaggggggaaaaggggagcttttcagtgggtataaagtttcagttatgcaagatgatatggtttggctgtgtctccacccaaatctcatcgaactgtactcccataattcccacatgttgtgggagggacctgatggagataattgaatcacaggggcagtttctcccatactgttctcatggtagtaaataagtttcacgagatctgatggtttgataaggggaaactcctttcgcttggctctcattctctctcttgccgccaccatgtaagaagtgccttttgccttccgccatgatcttgaggtctccctagccacgtggaactgtgagttcattaaacctctttcttttgtaaattacccagtcttgggtatgtctttatcagcagcatgaaaatgaaccaatacacaagatgaatgagttctagagatctgttgcacaatgtcatgcctatagtttacacagtatcgtacacgtaagaatgtgttaagagggcagatctcatgttaaacatttttaccacaaaaaaataaacatatgataaaattaagaacacaaggaaacttttggagaggatatgttcattaccttgattgttgggatagtatcctgggtataagcctatgtcaaattcaccaaatcgtatacatcgaacatgtgcagttttggttttggttttgttttgacacagggtcttgttctgttgcccaggctggatggagtacagtggtgcaatcacagctcaccgcagcttcaaactcctgggctcaagcaatcctcccatgtcagcctctcatgtagctgggaccacaggcacgtgccaccacaccagtctaatattttttatttttttgtagagacagtctcactttgtttcccaggctggtctcaaactcctgggctcaagcaatcctcctgcctcagcctccaaagtgctgggattacaggtatgagcccctgtggcctgcccagtttttcaaatgtatcgattacacttcaataaagctgttttccaaataaaatgaaaaagaaaactcaaccatagcgggcgatgggctgtgaagtgggagggaggattcctccatggctccccgactttgaacttggatgcctaggtaaatggcaaaccagggaagacacaatagaggcgggtattggtggatttccacccacaactgccccacataggcaaccgctatatgaaatgttatcacctcttcgttcatgatatatatatgcagtgatgtgatgataaatgtttagcaaccatatctccaaaaaattgaatgtatgcgtgtgggtatgtgtgtctattcctgtacaagtttactacaaatttttaaaattttttcccagcttcattaaggtataattgacaaatcaaaagtatacatatttatagtgtataatgtgatgttttggtctgtgtacacattgtaaaagattaaatcaagctaacatatccatcacctcacctcacatacttagcttatgtttgtggtaagaatacttaagatctactctcttagcaattttaagtatatgatactgttatgatctgaatgtgtgtgtccctccaaaatgcacatgttgaagcctaatccccaatgcaatagtcttaagggacctttaggaggtgaggagatcactggggtggagccctcgcagatgagattagtgcccttataaaagagaactgaggaagcttgttcttcccttctgccctgtgaggacccagctagaaggcatcatctatgaagcagagagcaaaccctcattagacactgaatcttctagcaccttgatcttggacttcctcagcctccagaactgtaagcaataaatttctgttgtttgtaagccactcagtttatgatattttgttatagcaacccaaacagaccaagacaaatacattaactatagttatcatgctgtgtcttataaattttttgacatgaaggatgtatagcacacaatttacaaataataagattgccttttatgtaaatcggtaaagtcaattgattcttacagaatggttttgttgatttttgccaaaccattgtaattgcagccaacatatggctgcaactgatgaacaagtgtagctccaatatgaatgctggttaatatttttgttttacattaacaagtaagaagaaagcaaaataaatgacaaagacatatggtggaaaacattttcatcattcataagggcgactctttgttaaatcaggtagtagttgtcaaatactagaagactgtttcctcaatttttgtgccatttacaatgcagcagctgaagacatgacaaacttttaagtcgaatctgcatgattaacatttccccacacttccttgtgtctagataatcaacaaaacaagcaagctctgattggcagaatttgtcaatttttttggtgtaaatactcccattgtggcatattccaggctaccaaggtgatgtcactgaacacagagttgcaaagagatgtacagtagcacaccagagtattgtattttcaccacacagatgcaatagctggccaggttcggtggcgcacgcctgtaatcctagcactttgggagactgaggcgggcagatcacttgaggttaggagttcaagaccagtctggccaacatggtgaaatcccacctctactaaaaatacaaaaattagccaggtgtggtagtaaacacctgtaatcccagctacttgggaggctaaggcaggagaatcgcttgaatccacgaggtggaggttgcagtgagccgagatggtgccattgcactccagcctgggcaacaagagtgaaactccgtctcaaaaaaataaaaataaacagatgcaatagctataaataaccttaaaagcacagctaataataaaaggcagtaaaatgattaagaaatgatgagcttagaatgttatcatcaaattcaatataatttatttaacaataagtgtaattaattttgaatcatggctgtgtttaacaactggcttgcaaaattcctgaaaagttaacggttggctcttgcatgccagttcagcccagccccaatgcaccgtgacataaatgcccaaacaatatgttattttttgtactttaaaaaatggtaatatgctgcatgcaatctgggagttgctttttcataccacattatgtcactcttgtcttttgaccctcaacatcatccttgccccttctttgctctcagctgatgtatcacaggatggggcagcctgggaacagcccttagggtctctgttctgagatcatcagtgagaagcacatggtgggacaaagacagatttcactcttcctggggcagcgacagcggcagacaaccgggcttctgcagtagcaacagtggcttcctgatacctcctgacttctgaggagcaccacctcccttggcttttgctccctgaccatcctttgcaaccattttttctttctttttttttttttttgagacagaatctcactgtcgcccaggctggagtacagtagcacaatctctgctcactgcaacctccgccacccgagttcaaacgattctcctgactcaggcacccgcccccatgcttggctaatttttgtattttgagtagagacggggttcaccacgttggccaggatggccttgcaaccattttctaggcacctaatttcctgaagtaaacccttcctgctggaaatatacagaatggtttctggttctcagactaaaaggctagaatgtattcatgttaatgcttgttgcctactttcatcattttcactgtggtataatgttccgttttgtggccatatcccacaggattctccctaacttggctccattttacaccctgcctgcccagcctctgatacttttcatagccagtgttctcagattagattaatagagaccgtgctgcggtgtttacccaaatggttctcatgcttacccattagcgtcctcaatccttgatctcattccccctccttttcccatagatgaaccggtggatcctgctttccagtctgtcacccttggcgtacaggctaccacgagttgaaggagggtctattgctggagaagactggttcataggagtccgctcaggctcgcagctgccaacatgaaaaaaaaaatcatctcagaaaaatgtagctcagctgcttacaataagtcattgttatacctacgtttatcattgtggggcacagatgcaaccgtttctctgtgctaacaagctgattaagctcagccaggacttttccagagggtcctccctctccccacataatctatgttgagatgctcagcacagaagttagtgcattgctggaacaaaaagaagtctctctttagagggttcctagcatcaccgcaactcccaattctcctctacctctttgtattcctttgtatcattcattcctcgttccatgtttcgtgtcactgagcctttcaaagagggcagatacagctctctatatttcacagagagctctagaattgcaattacatccatgacacatattttcatacccctcaattctagggcactcatagaccacagtaagagatgctcctgctcattctgaggaacaccaacaggcaagatgcaccccctgactgccccaccaagagcagaccatctgccctctctgacggcatgcttcactctgtcaacatgaaatggcatgttgttcctgaacatcccatgatggtctgtgcttctgtgccttttgcctatcctatttctgcttctgggcacactttttctctccttgcctttgggttgaagccctactcacccttttacacccagttcattctgagttggacttctggaaggatcagaaagtatcctccatgcagacaccacacatcacttcaccctttttcccaaggcaaacaacactaacctagtccaggtcatgttcctgttaggcccaggtatgcctcaaaaactctagcagaacagcaccccaggcagcatttcccagtcaatcacatgagcaagcaagatacacgcctctctgtgtccctgtctaggtttcttccgtgtccctgtctaggtttcttccgtgtccctgtctaggtttcttccttttctggagacaggctagggactggcagctgtgactgtgtattgctaagtgcaattccaggagtctgcagaatggaaggcacatcctttttttttttttttttttttaagacagagtttcacttcatcacctaggctggaatgcagtggcgtgacctcggctcattgcaaccttggcctcctggcttcaagcaattcttgtgcctcagcctccctagtagctaagattacaggcatgcatcaacacgcccagctaatttttgtattttagtagagacggagtttcaccatgttggcccaggctggtctcaaactcctgacctcaagtgatcctcccatctcggcctcccaaagtgccgggattacaggtgtgagccactgcgaccagccaggagccaaatccttgatgcctccacagcccgaggccaagcaggcctccctcttcctgtgctccctgatctgtgctaagatcaggtgctccctctattccccaatcctaacccacttggatgcacatgtgattttagtacagcttcctttaatttcatgtttaatgatttttcatactacaactcttttttgtcagagctgtatttctatgctttttaccttcattggcaaagcttctggaaacaaagtatgttaatgaaattttaaaaataaaaaaattacataaaacccaattcaggtatctccacttccataaagctttctcaaacaccaccaatctgaaataccctattccatgacctctgcacgttgtataggattctttatgcccttgagggatgaggtaaagtcttcccccttaatttctgtcactttaagagcaaacgtagtaacagacaaggagcagacttactgtttaccataagagctgtagattcccaagttcagtgttcatcagctaaaatgtaaactcactacatgcttagcattcacgttggcacatccaggttacccctgtgggacttgaggggcaaggggaaccagtgccaacatgacgctcattcagcttgctgtgccatgaataataaagtcctttgtctctgacccagggatcttgtgtcttctgccagcatccataaaacagtaacaagctaacttatcagcttgtaagtagagtaaaatctcagaccctttgcaggtcctggtctgagttcatgccttttcttctttgggactggccccagagtccagcataggtcctgattagtatatatgtagaaagtaatcaagttcaatggactagactgaggacagggaactttccttctactgaataccacttagcccagtgtttctcttttttttttttttttttggcccagtatttcttaacctcagcactattgacatttggaaccagataattctctattgtaggggggctgttctgtgcatgataggatatttagtagcatccctggcctctacacagtagatgtcagtaatacccacccccaatcaaaaatgtctccagacattgccaaatgttccctggcagagtagtctcatcctctaccctcaccactgaaaaccacttattttacctatgcagaagtgggggtggggtggggaggaggaagcaaggggttataactaaattatcatttagtggagtttgagatgctaatgtaccggagaggtatagaaatattgcactcacctgcctattcactcaaggatcacacatgataagtcatgacatattgcagccaacagtaaaacacaatcgtcgtgagcacccatgggtgccgggcaggagcgtccaccgttcatccacaccctcagccattctgtgaagtgggcatttccactctgcaagaacctgaggcacagggaggtcacgtgccttgccgaggggaagagtttggacttgaacgcagagctgttgatctctgtcgcacttgttcttaatcattaacctattgttaatgatccgacaaagaacgtgggggatgacatggaagagaggggattggaagttatgaaatgggaaaccaaagtttactttgaggggaaaaaaaagtcaaacttacatgtcaatagcatcctcttaaaggttgaaaatatgtaaccctttggatattttaagagcacatatagtatcagaatctgtaacaacatgtactttaattcctacataaaatgttaaaatacagcccaagtgaatagctctctttcctgcatccagaaaaatgcgaaccatccagtctaggaaggagcaaagtgacaaaacctgtttgaacaaacccaatgctacactccacttcaatggagtacctttcccatctggtggtgggttcaagaattgtccctaaaacacttttaaatccactcgtgactttgcaaagtagtagcatcagtgccagcctgagtcccagcagttagacacatattgatcccccaaattgattactaattgacaccagattctggtaatttcaagggcaggtcaattactggctgcctatagaattattagtacaaaggtgagtaacccctaaggaaaaacactattttgactttatttaaacttttccctgagaagctgacattcctctacaacattaattctcagaaatatttttaatgcactgtaatattttatcttggaggcagagaaaaatagcaagaaataagaaaggggaagagagtgcatggaagagagggacagtcacagtcattgccatattcggtggagagccaaaaataagaatacacaattatgtttaaaatatatggggccgggcacagtggctcacgcctgtaatcccagcatgttaggaggtggaggtgggtggatcacttgaggtcaggagtttgagaccagcctggccaacatggtgaaatcccatctccactaaaaacaaaattagccgggtgtggtggcaggcacctgaaatcccagatactcaggaggctgaggcaggaaaattgcatgaacccgggagccagaggttgtagtgagctgagattgcgccactgcagcctgggcaacagagtgaaactctgtctcaaaaaaaaaaaaaaaaatatatatatatatatatatatatatatgtatatcaattaaagattttaaaaggggtaagtcaatttctctctggaatcttgaaaatataatccagaaaaatgaatgactccataactaaaatattaactatacttaaaagtagaattgatgtccaatactgatatatccagataactcatattgacacaaatatctctccaataattttatgttttccaatataattgtctcatgtcttcattctcccaatctttacactgttctctttctttttacagtaatatcatagaaaaattggtaatacatttgtattcattaatctgacaaatagttattgagcacctgctctgtgccaggcattgggatacagcagtgaataagacaaatccttgtgcacatggggcttacactctaattggggacacaggcaatctacaagtacacgtacctcaggttccatagaaagcactaaatatcatctcatttaatttttccagctctatgtggtgggtcctattatttttcattttacatgtgaaaaacaaaaacaaaaacaaggctcagagaggttaattggtttgcccaaggactcagatgagtgagtggcagaaccaggattcaaaatcagatatcttctccaaagtccaacatcgtccagctgcaagttttcaacagcaacgcagccagcatccactgatgacagcttatgtgccaggccctggggaatacagaagtgactggggcctgcctccaagagttagcgcagcatctgcctgcctaggggacatcaggcttccagtgtctaacaggacacccacctgctcactggcattcactgaaaataacaaattctcccgatctcagctccaacattctgaaaaaaataccaaaaattattatttaaaaattatagcaaaagttggccaggtactgtgactcacgcctggaatcccagcactttgggaggctcaggcaggtggatcacctgaggtcaggagttcgagaccagcctggccaacatggtaaaaccctgtctctactaaaaatacaaaaattagccgggtgtgctggcgcatgcctgtaattccagctattcgggaggctgaggcaggacaatcacctgagcccaggaggtggaggttgcagtgagccaagattgagccactgaactccagcctgggcgacagagcaagactgtctcaaaaaaaataaaaaataaaaaataattgtaaaagtgaaattcaacaaaaggattaacatcaagattaacatgaactgatcctgtgatttccctacaaggggaggaaaagctacgtttgaggctctttggatttttgcggggctttctttccccattttatttagaataaggcaatggaagtgcagctcttgcttctatactaagcgcattttgaaagactcattgacaccaaacatcaatgaggaatgaaacattacaaagatgctcccctttaaacaaacataaagtcagcgcttttaaatattatgtgcttcttggacaggtattctaattcaagacagcatctcacacaaactggagctggcgatcagtcgaataacctggctgacatcactgataaggccaaggactcccagcaccttctgacaaacctctgtttcctgcttcttgtctgaagtacactgtttgcttggcaaaagccaggagacgtgagaacctcccacagcaaatgttgatataaagaaaatttcctaagtgaccagtgatatttatccaggtattatttccaccacctgtgcagagtttaccaaggaggtgggtagggtcgctatcttgggtgcgttcagcttgagttgcctggataccacatcttgagttcaacagggaacataaatctaattgttcctctcttcacttaaaccctaaggattccaaattagattgcattgctgaactacatgagtgaaccttatgcatttgacctctcaatgtggtttgcaaatctaccctctggaactaaaggcaggaagctttgctattgaaaagatgttagcgtctcatcaaacacagccaatgttcaagaatcgtgccccttggcaggagcatgttttaattgctggtgatattgcagaacagatttctgaagtctaattttctttctgcagccaaattttcgacgtatattaataatatcctcataaacttacatctgtgggtacagtcatcgctgcatagttggcttcacagttctaaaaaagaaaaagaagaaaatttggaaaaattattcccaaaaaggacacgattataaagttgatagtaggagcaaacttcaaagttaccactcctatagaatgtttagaaaattttaagatgattaaacttcatggaaatttttaaggtctcttttcatgaaattatttttttcttttgactatatttccattttatagcacttatcacaacagtaattaacgaattagctgcataatgatttatttaatgtcagtccccctgctcgttctgtaaccccctccaaagggaggaaccgggactgatctgtttaccttcccaatgctcggtatattgacaaatagcaggggctcaaaaaacttttttttgctgctgttatctccataataggatcatgattgcattgtcagaagtgtcaattagctacctcaaaagcacttggcttcatttaatgacttcctctcatactacagttatgcaagatgtgacggaagtaaaggaaacatggaatatccttgtatattttttgcaacttcctatgaatctacaattatttcaaaacaaagagcttttctataaaaaaaaaaaaaaaaaaaaaaagattttgctccctgccaccagcttcttggatttcacctagatcttaggaacttccatctcaatcttcccatacccataatatacttggcttcctgatttcaacaatgttttccaggaggttgactttcaacaacccaatatgagctagaagctcagcgttccttcccacccacccttgacaaagcagatcattttatacgacaacagccacttttctgagagggcctgccaaaatgccaagtgtggtgccaatttttatacaattgattcctttctgtctcctccacacagagaccaccaaaaagctgtcacatggtagtaattttcaagaactcactggcacatcaagggtcaggaagaaatgttatgttgatgagctggtcatttgctcaagatttctggttggcaagaaaatacagagcgtgcacacccaggttcccagacgacaaaccacacacccaagtattattgagcctcatccatggcagcctcatgttacacaatgaatcaggccaccgcccagcgccaagagccttggaaaactatgcaaagtgcattaaaatcaacagaaaaacttctcatgtcacaatatttagcttctcacttctccaagcttcccccaaaaaccaaccctccccggccaaagtttgacgctactggcttgaatcacacagtcagatttggacttttcaacaaaccacagaacagatattaactttcctgtgagcctgggaatacggtcggcagttctgggcatgaagagaggttcagtgtccaggggcagagctgagccagggttgcagggagccagcagaaggtggttcccagctgccctctccagccctgagctgagcccactctctggacctctttgtcttcccaaatgatgcccttccccggaagaaaaacaaaacaagaccaaaggccaggcgtggtggctcatgcctataatcctagcactttgggaggccaaggtgggtggatcacctgaggtcaggagtttgagaccagcctggccaacatggtcaaacctcgtctctactaaaaatacaaaaaattaggtgggtgtggtggtgcatgcctataatcccagctacttgggaggttgaggcaggagaatcacttgaacctgggaggcagaggttacagtgagccgagatcgtgccactgcactccagcctgggcaacaagagcgaaacttcgtctcaaaaagataaataaacaaagccaaaaatatctgcctttaaattcacatcagtctctgtgggtcagaagacaaaggctgtctagctctccaacaccttcacaggcttaaagcaggaccttccactgactcgtgtgaaggcaatggcaaataacagacattcaaggagaaacagctttgacgaacctctcctgacagtgaggctaggagagagaaaaagaaatgaaaatcaatttgcatgatcaccaagacagaaatgggggcagagggaaagagggccgaaaggagagagaaatgatcttcgttattaatgtttttaatatggcagcatgattaagacatagtctccctgccaggcagcaagttcagagggagacaaaccgcccatcttctcatgggtttttagcaggagagtaatgcccattggcgtaacagtttcaaatcgatacagcactttcacctatagaaactcacttacggacaggtgctctggctcatgcctgtaatcccagcactttaggaggccaaggcgggcagatcacctgaggtcgggagttcgagaccagcctgaccaacatggagaaaccctgtctctactaaaaatacaaaattagccaggcatggtggtgcatgcctataatcccagctactcaggaggctgaggcgggagaagctctggaaccggggaggtggaggttgcagtgagccgagatcatgccactgcactccagcctggacaacagagtgagactccgtcaaaaaaaaaaaaaaaaaactcagttaaactctcagccatcctgagatattgtacccaatttacagaagaggaaactgagacttagagagcaaggggcagaaccaggagaacagtgcgatgagtcaggccagccattccgtagggaagtgaaagaagcaagtgagaattgccgtgctagtctttgggaaaaataagataaagcatagctccccgggtaggggtgggggagattcctctcctcctttggagtaggcctaggactacggaaacaggatttcagagttacacttgttctgacaatccagagaatagtccctaagcagataaatgctcatttcaaaggtgattctcgaacattgtctccaaaaagaaatccacccagaaatgtgagatgagaggactgtacacaaagggcctcaactgttgcttccattggcggctccaatgggatactggtttaagtcaaaatatcaaaggatttgacggtgagcagcgctggccagactcctgactgcagccatgaggagagagaagcccctgttgtccaggcttctgttcacacatctgcattttcccagtgcaaacagaggtggccttgcgggacagagcaggagagtgaggagggagatggatcatcactgtccctcactgatgccagtttccttttcaccactggggataaaaatgcttggctccaggccagacaccatggttcacacctgtaatcccagtgctttgggaggccgaggcgggcagatcatctgaggtcaggagtccaagaccacctggccaacatggtgaaaccccgtctctaccaaaaatacaaaaattagctgggcatggtggtgtgcagctgtagtcccagctactcaggaggctgaggcaggagaatcgcttaagtctggggaggcggaggtgcagtgagccgagatcgcgccactgcactccagcccgggctacagagtgagactccatctgaaaaaagggaaaaaaaaaaaaagctcggccccaccacctcacagagccagagttaaaagccaacttgggccggcgcctattgcatctaggaaggtaaagcctagtaacctgggggaaactgttttcccaactcagcctacgattccattttgttttatttaacctcgttctgggcgtgcagtttgtagccacgtgggaggctcctgtactgaattgtttccagtgtgctgaaccagactgatgtttccctgatgctaggccagtgcgatctcatttctcctcctgtgagagatttgggagcacgcctccctgggcagaggctaaggggagcaaaatagtgcacccccaagtgctagcagccaacataaaccatcaggcttagtagtagggaatggaacagccaccctgcaatggctaaaatacacatcacataaaatttaccatcttcaccatttttaagtctacagttcggcagtgttaagtacattcacatgcgtgtgcagccaccttcaccaccatctccagaactctttacatcttgcaaaactgcaactctgccccattaaacactaactccccattccccttcgccccagcccccggcaaccaccgttctacctctgtctctacgaattcgactactctagagacctcgtgtaagtggaatcatacagtagttgtccttctgtaactgacttctttcacttagtataatgtccccgaggttcatccctgtgtccgaattcccttcctttccaggctgggtgctgcgctggtctatctacagccatacagcattttctgtatttattcccccatcgatgaacgcctgggctgcttccacctctcagctatggtgaataatgctgctattagcacaagtgtacacacatttgttggagtttgcagccctttctcacagcttcccaaacagacaaatagaagtgaatggcgcatcccagaagactgttgtttccctattgcggggttaactgcccaagtccacctgaaggtgatgggccgggcccttccgattcaagctggggctcagggggctgtctcagaggctgccaaggctaccttactgtacaatgcctcacacacacacaacacccaccacaatgcccaagcttcacacaacatgcaccccaactctcccatataccccaactctcacaacacacaccctatcagatgacccagctctcatacacctcaactttcacacataccccctcacacacaccccaactcacacacaccccaactcacacacaccgcaactcacacctcaactctcacacatcccaactcacatacaccccaactcacacataccccaactcacacacaccccaactcacacacaccccaactcccacataccccaactcccacacaccccaactcccacacaccccaacttccacataccccaactcccacacaccccaactcacacacactccaactcccacataccccaactcacacacactgcaactcacacctcaactctcacacaccccaactcacatacaccccaactcacacacaccccaactctcacatacaactcacacactgtaactcatacctcaactctcacacacaccccaactcacacacaccctcacacacctcaactctcacacacaccccaactcacatataacccaactcacacacactataactcatacctcaactctcacacaccccaactcacacacaccccaactctcacaccccaactcacacacaccccaactctcacacacacaactcacacctcaactcacaccccaactcatatacaccccaactcacacacacactcacatacctcaacgtacacacactgcaactcacacctcaactctcacacacaccccaactcacatacaccccaactcacacccaccccaactctcacatacctcaactcacacacacaactcacacctcaactctcacacacacccaaactctcataacacacaccccaactatcagatgacccaactctcacacacctcaactctcacacacattccaactcacacacaccagctctcacacgcatcccaattcacacacaccctagctctcacaacacacaccccaactctcacacacctcaactcacatcccaactcacacacaccccagctctcacacaccccaactcacacacacaactcacacctcaactctcacacacaacccagttctcacacacactgcaactcacacaccccaactctcacacataccacaactctcacagcacacaccccaacagatgacccaactcacatacaccccaactgtcacacacatcccaactgatacacaccttaactctcacacactccaactcacaccattccgacttacatacaccccaactcacacacaccccagctctcacacaccccaactcacttcaagtcacacacctcaactctcacacaccccaactctcacagcacacacctcaacaatcaaacgacctcacacaccccactcacacacatcccagcttgcacctcaacacacacactccagctcacacaccccaattcacacacaccccaactcacacacccctcaactcacacaccccaactctcacacacaactcacacctcaactcacacacactccaacccactcacttcaactctcacacaccccaactcacaaatgccccaactcacacacacctcagcgcacacctcaactctcacacaccacaactctcatatctgagccccaccaatcagaaaccctgccatgtccagggacttcacgaagacagcctccaggccaactcaacccggagtcgagtccagtggctgtttgctcctggctctccataagagtttgcttggactgaggtgaacattcactggcagaggactctgtgtgactggcttattccacgaatgccagcacctacctgactcactgacctgacccagcacttccctaagcagtagccacatggaccactgagcaagcaagtggtgcaataagcgcactgaacagatgctggttaatcaggagggcagtaaggtcttcccggactgtcctgataagggtacctatggtgacaatagcagaaagtggccccagacttcaacctatctgctttcctgcatctgggccccagccctcctcaggaggttgacttaaccactcaccacaccaataaacaaatctcccttcaacctcaggcagttcaggcatcggatggccaaagtgcagagaaggatgctttccctccccttttcaggaagataggagaagaaaagtcctgtggatagcatccacggattgactggctttgccaggcctgtggatagttatagtcacagatgtcacaaggtgcacaaaacaaaatgatccagccattagagaccagggctgcttctcagcagggcacaaggcaggaaactgaaagatcactcaagtctctaacgaagaaacccaaccagaaacaatagaagagacaccttctcaactatctcaatcaaatgtgtcgtcatcttctgcaacagaccttactgtctttgaaccaatgcattcagtcatatctcaaaagactcccagctctggatccaatcggcttgaacttgaacccattttgccaggaaccaggagaacaggctcctaggcagagcatgaggctgtcaactcacctcttgtggaaaggtttgctctgagtttgttttttaaataaagagggcaacggcaggaataattacatgtagtaaatatactactcccctcctcaagtaacctcttcacagcaaccgagacccaggaaagtctgtcattaaggtccataaaggaaaaaaagtgcatatcaacattgaggtttttgtggtgagccatgatgagttctccctagagtttgctggtactatctcaccaggctcttttatcccaacatggctgtggtttagtcttcaaacaagttgaaaggtaagcaaatacccttccttccaggttacatttgactgccctcagcgtcaggtgtgttttgtgaatgccagcattatcataaaaagccacaattcacccacacacaaccacagaacccccatctaaaataaaccagaactggggcagagctttatccaaagaacaaaatcaaatgtgcttaaaaggtgatacagccagcttcacgatcgtggatcttcttgaagtgggaaatgagagaattaagagaaatcagatgagtaattcaaaccactgtaaaaccctgccaaacatcacaaatgaagtctttttttatttatttttttatttcaataggtttttggggaacaggtggtgtttggttacatgaataagttcttaagtggcgatttctgggatttgggtgcacccatcagccaagcagtgtacactgtacccaatgtgtagtcttttacccctcaccccctcccagcctttccccccgagtcccgaaagtccaatgtattattcttatgcctttgcatcctcatagcttagctccctcaaatgaagtcttaacaacactgactaaatgtgcactgtctaactcagtagtcattagcacatgtggctatttcaatttaaactttagttcattaaactgaaataacatttaaaattcagctctgcagtcatgctaaccacatatatcaagtgctcaaaagccacatgtggttagtgactaccatattgggcagcacagatataaaacatttgtatcatcatagaaagttatattttccagtatataagactaactactaaaaaagggaaagggagtagaaaaaaatggtctttaaaaaaaaaaagaggtccaaaacctaagcatccactgtatacctctcttgcagcttcctggagcctcattcaaacacaataaacattcagttgacttgttatgagactctaggactaaataaccaatgttgttccattaaaagatagtagcagtacatgagccatgtcttattatttttgtaattattataaatttttaaataaactgagagcaaccctttttgcaaaagattggttgatggcctcctgtttattctgggaatctgttctcctgatttctggtgggatgattttagatcttgctggaaaggaataggaaaacatcctacttcccacttcaagcacttttaggatatatttatttatgatccttattctttccataaatgttcaacatagattgaatgatttttcttattttaggaattttcttagcataagcatttgctaaggaccaccccaaatttggatgttattatggaacagtagagattatcttagtcaaggcaaagcaagtaatgaaaaccaacttgggctaccttgatcagaaaatgaaatttgtgagaaggatgcgggggtgcttcatggaacccgaggataaggagacttcatgagcaactgggggactgggaaatccacgagctctctgcctcttagctccacatctctttgtacaactactttctccagaacttcattgtttacttcacttcatagggtagaaaaagaccatcttatagctctaaggaatacctatggccactccatgacttctggatttttgtgtgctccttggtactcaggatttctgagacccaattctaagtgcccaggaaagctgatttacccggcttgccccagtgatccaaacaaccatggaaggaggggggaaccgtcttaatgcaaacgtgtcagcaacaggtactgaggtctcagaaatcctgagtaccaaggagcacgccctcagcactgtgagacctgagtagatggttcaaaatccagccatgggccactaaatttccacttaaaatcattgtcatggaatcattcataatttacagttgccattttgccattgacaaaattgtggaaagaaggaacttcctgacttgtctaaagtcatagctactcattggcagagacaaaagaattatatgtggaccttgattcctgcctcctcctatttctaccacatcccattgaaactttcaccaattcaatagaattgaaattgttgaatttgcacccactaatgatccctcaattattaactattcccatacttgaatgttgtgtacacacttttgcacagttctaatgatatgtgcagcaggaatcttgtctaggctgtagatgaagcttgtggaggtgaaagacccacccacatgcatggcatccactaattatcatggggtccagaaacctccccccaaattactggaatctctgttgagcccaggagcaggtagaacagtgccaagtaggggaagcccacagaaggtgggaatagaggagactgtgacagtccctgggacagagtctactgtgctggataaaggttgaacctgatgtgtcagattcaccaacaggacctgtgggatagagggaaatggtaattctaggtacgactctgcctggatgctgcccgcaggctcaaccacattgacagtgtgtacatgatttggggaagaaaaaggatgtacaatacaaacaattaagagagctgtaaattcttgggagccagcacccagcatctctgaagagggagcgcctccagaaaagcagagattggaaggtgtttccctagcggcaagagaggggtaagccccagcacacctaaagtccaggaggcaacagaggctgccttccatccccactttcactgctgcccccaccccaccgccccaagcaagtatcagcagaccaaagaagtcttagagctttaaggggacttggagctccagaaacaaaagtaagttctaccaacaagtccaatgtagaaaactacggggaacgacgctgattggccccgtttgcattacctgacaactccaggaccaatcaccatggtgggaaggatgtggcaccataagcagcacaccctgcgtcaggtgcccgttcagccccccacaaccacacatgttaggggaggaccagcaggacctcaaaggtgaagagaggtactgttactggaggaagaagtgctaaacacaccaaaacagcagatacctactgggtactccccacctgagggatttctacacagttaacctaacaaggtcaagaataaaaggtatgaataagctgaaatcactttagagaggagtttctgaaaaagaagatgctaagataagaccttaaagttctccaagaggataatatggaaaaaagacaaggaactaagacaaccaagaaatagaagtataggaatgaaaaagacaaaagaaataaactaaagagcaataaaagttgtcacataggctgggcgcgctggctcacgcctgtaatcccaccactgtggaaggccgaggccggtggatcacctgaggtcaggatttcgagatcaaacctggccaacttggtgaaattccatctctattaaaaagacaaaaaatcagcaggattagcaggcaggtgcctgtaatccctactcaggagactgaagcaggagactcacttgaacccgggaggcagaggttgcagtgagccaagaccacgccacggcactccagcctgagcaacagagcgagactccatcccaaaaaaaaaaattgtcacgtagtagcacctcctaactctacatgcattctttcatttaatcctcctaaacagccctgaaacaattctgcatgattgattatcacccccacttagagaaatctgagtttcacaaaatgaaatcactcacccaaggtcattcagctagttatgcagctggattggaaatgtaacctaggttagactgacctccaagcccctcccacccccttttatgtctctctgccccctccccactatactacccccgcatcctgcagagtctgaaagtcaatcacgaggactttggagcttgtgtgaatatttttgaaaatgcagtaatatccatatcagaagttcgcatgtaagaattcaataactactttgagtttaactggaatggtaggaattggaaagccaggaaggtgtgaggtagggcttcccacatgttcatgccataagcatctctgtgtgcttgttaaaactgcaccatctaggtcctcatccccagagattccaattctttgggtctggggtgaggcccaagaagtgccactgcaacaagcatcagctgattctgaggtcatccttcagaaaccctggggagagaccacggaggaattcatgataagaggctatgattaaagaaaaaaaggagaaaggtgttgcattctaagactgtgagaactggaaaagaagaaaaagagatgtgtcaaaggcgaccactaaatctacttatctgcctttgacgatgaatgtagtctttatcccaagaagagaatattctggaagagctgggcaactggtaaaaggaaggggagaggggggagatgcctcctgcatcagtaagtggcaagataccaaacctaagctaaggcttaaaataattattaatacttgatttaagtttataaaagagtaaggaatgaaaataagaggaaagaatgcactaagtcaatgttattgatttacactgtgaaagaaatgccagaactattatttggatgtcaaaataactccaagaagagtacaaggctgttttgataatttgaaaccaaatacctcccttctttgagatgaggctttcagacatagagcctccttaaatcccactgcgatgttctgcgcaggtcatatttcctcttcaaaggttattccctgttaaattatctgcaatttcaaaaagaacaagtcgttgtcccactttgagtccccttctcttaaaagcatgttttgactaagattaatttatagcccaaggagatttggagaaaggaaaaagccttgaaattgcaagtaaaaataagaattccggtcgcttcttaaatatcaagtaatgttgttttgggaataggaccagatttgcagagctacaggtaaatggactgactgtgggatttgcagcatccagaagacacttcggtgggggtaggaaatctagctcgatgctgcagggtgtggaggagtcttattgggagccaatactgggcaatttgctgagcctctcagcagttcaccagacaagaagcggtaaagtaggaaaaaagaggacaaagatgctcagcgccttcttgggagtgttgggaggctaacgagtgaatgcttgtgaacacttgtgaaggggctggtcagcaggatggcctggtgcatttgacttcaggcttccaggaagcacgcttgtctccaactgtgtcttgaccactcctatcacaacggatgtgctcactgagagtagcagtatagactaaagaagaccctttatggattttctctgatttttccataataatttctcatttgcgctttttctatgcttgcctttacgtaggtttggaatctctgcgtcagtcatatatgtagcacttgctgaacaaaccaataactaggtatttgaggacaactgaaggggaccccgcagagcctgccaggcagtgctaacagttctaggtttctcacccaccttagaagacaaacttccttctacctcttggcttttacatatactcactttgatcattccaattccagtggatttttttttattattcaaatgactggaagaaaaaggtgttttcaatagggtaaggtattaagtgcacagtggctttgatctgttggcatttcctgaatccttggattttcaactgtggcccaattcttacttccttagaaagaggatccgttagtttgctgaggctgccataacaacataccacagactagggggcttcaacaacagacattaatttcctcacagttctggagactgaaagtccaagatcaaggtgtccacgggtttgttttctcctgcggactctatccttggcttgctgatagccaccttctcgctgcatcttcgcaaggtcacccctttgtgcatgtacaccctggtgtcactcctttcttttttttttttagagtctcactctgtcacccagactggagtgcaatggtgtgatctcagctcactgcaacctctgcctcccaggttcaaatgattatcccgcctcagcctcccgagtagctgggattacaggcgcgcaccaccacacccggctaatttttgtatttttagtagagacggggtttcaccatgttggtcaggctggtctcgaactcctgacctcatgatccacccacctcagcctcccaaagtgctgggattacaggcgtgacccaccacccctggcccactgccttcttatgaggacaccacccttatgaccacatttaatcttaattatcttcttaaatgctcttttcccaaatgcagtcacattggggagttaggacttcaacatgaattctgtgacaatacaattcagttcatgatagaggataacccagaaatattaacagagtcaactattaagactctgaagaggccggtgtggtggctcacacctgtaatctgagcactttgggaggtcgaggcaggaagactgcttgagcccaggagttcaagaccagcctggacaacatagtgagacctcatctctactaaaaacctaaaacaaattgtccaggcatggtggcatgcacctgtgggcccagctactcaagaggttgaggtgggaggatttcttgagctggggaggaggaagctgtagtgagccgtgatcacaccactgcactccagcctgggtgacagggcaagactccatctcaaaaataaaataaaatctgaggcaggagaatggtgttaacccaggaggcggagcttgcagtgagccgagattaggccactgcactccagcctgggcgacagagcgagactccgtctcaaaaaaaataaataaaataaaataaaataaaataaaataaaataaaactctgtagaatggtggaggggtttaaggtattactctgttacaacttgatccataatatatcaatgtacaaataccacgggttaaaccatacctctaaaataaatcaactatatatataataaaatcccatatgcatgggagaagatgatactatttctagtctttacttttttatataattgaaagggacttccattcaatcagaaacgcttggacattcattttatatccaaatgataaagtatgtcaaaatacacgtcttagaaaccacttgtatttagcttctgatgggagaaaaaaaatgtggatacagcatttaataaataaggtatgagagcttttcactcaatatccttatgatccaaaaatctgctgctgctaaacttaaaagcaattactgttttataaacagtgagacataattcagaaggcacttaatccaacatgtgtaaaatctgtgtaaatcatcaaaagtgactagctgatggagatttctggtttctggcactaaatcgccattggcctatggttcttaatattttccttcgtcaaggtacacgactataaaactccatgaggattgacaaatacctcttttgcaaatgagctaacgtaaaatacctcttttgcaaatgggccaagaggcagtctataacatatgatcatttaagggagaggtaaggtcctggaactaaattgtcctaaattgtgttaaaccacatgcccacgacagactgaactcatccctactgatagatttttctgaagagtatagtgcacagcctttctggcagctcacaacacttctaccaggcactccacaactgacaccatcaaggtgaaaacatgcagatgccttcttagcctaaccaataccattagctcagatttcccatttatctttttatcctttattattttctccttgcttccagcattggattactttcttttaagtcatatttctttatataactacactttcatccaatgcgtgccacctcccatggaacttgtctctttttgtttttttgtttgttgttttttgagacggagtcttgctcttattgcccaggctggagtgcaatggtgcgatcttggctcactgcagcctccacctcccaggttcaagcgattctcctgcctcagcctcccgagtagctgggattacaggcatgcgcccccacggctggctaattttgtattttcagtagagactaggtttctccatgttggtcaggctggtctcgaactgccgacctcaggtgatgtgccctctcggcctcccaaagtgctgagattacaggcgtgcgccaggaagttttctctttaagcttctcctgtgctggagagttatggtgactaatatctactaacaatcattagccaagtgtgatgatagaaaagaagacatagttgtgagtgaaacacaaaaagaaatagcgcatagtacagacttttttggaaaaatatttgtatacttatgacatattttaccataaggcacctgattcaacacaaatatggctggtgatggcatcgaatcgggaaagcactcattgttaacaccccctctaaagtgcgaaaaactcaggtcattttctcttgacaatggcactgaggttctgaagaacttccacagacaggccctgtactctccaatttcttttctaattgctgttaccaaatgattgacccaaaaaagcaaaatataggaacattaactacattctcttactggtaatctgatggcattttacctcagtaaggaatatttacagtgagcagtataaaatattatattgacgtccaatttccaagtgaaaatgacttgttcacggggttcaccgtacgcttatttataggcaactctggtatgaattatcatcattattcattcattaactcattcaacaaatattccttgagtttttaccagaaactacgcctggtcctgggaacacattgcgagatatgcagacaggatcccagcctgcaggaagcttcagtccagcatcagcactagaagggcagcagtttagaaagtgaaagactttacccagagcttggaagctggtgccggtggtgggggcgggagggggacgggggaggcagtgggggaggcagcagtgggggaggaggtggggggggaggaggcggggggggaagaggcggggggcaggcgggggggggaggaggcggggggaggcgggggggaggaggcggggggaggcgggggggaggcagggggaggcaggagaaagggggggagggggaggcagggggaggcaggggaaaggggggaggggaggcagggggaagcaggggaaaggggggagggggagacagggggaggcaggggaagggaggagggggaggcagggggggcaggggaaaggggggagggagaggcagggggaggggggagtcgggggggccgggggaaggggtgcggggggggtgggtccgttggtggtatgtgaataactcctcctctcttctcaggcccagtcccaaggcgcagcgtgcgtcagcaagacagcagaagcaggaggagagctggcgggaagacatgcaccccttgaagacccagagagaggccgtctgtctaccgcgtagcagttacatcagactgagacacttcctgtttacaggagactataaaattcctgccccgtgctcatttggggctgacgccattttaggcctcagcccatctgcacccaggcgctcactgaaacagtgtgttgctccacaccgccttgttttgcttgttggcgcgctctcagggttccgaccaatccaagagccttgcagaaagcattaacgtgcttttctctttggcagagtttttctttgctctgatcttggagacatccctctgcctagtggaaacataaggaatacagaaagaatgcaaggagatagaccaacgtgagattctccttcatgcactcaagagaaagatgttgcaggaagagctagtctttcaggctgggctggtgacctgagaaagaatgtccagcttttcttctccacttggcatatcaagagccaggcgtggaagactaaaacaggaaatgtttataaaaactgttcagcggttcgccaacaagaagtggtaaagtagcaaaaatggggatggagatgccaggaggaaagatgccaggggtaaagtgggaaaatgggaacctgaagccaggaggtcaagccaagccaacaggtgttctgtttttcagtgagtatatcctgtctttccccatgtgtcagtttatagaaagagcaacctaacaggctgccccatataccaatccagagcttggacatgtcctagcaaattcgacagcccacaaagcagtctgggctgggggcggtggcacgcctgtaatcacagcactttgggaggctgaggcaggaggatcgtgtgaggcaaggagtttgagatcagtctgggcaacatagcaagaccctatcactacaaaaaaattaaaaattagccaggagtgccagtgcacacgtgtagtcccaactactcaggaggcaaaggtgggagaatcacttgagcccaggagttgaaggttacagtgagctatgatcacactgctgcactccagcttgggcaatagagcaagaccctgtctctaaaactctttaaaaacaaaaggcaaaaacatttcaaaggaaacctcaaagatcagctgtcccaggccacttcattctcccatagcagagaccctgagctgagaggcagtaagccaagtacctccctggccttgtggatcccagcctggggtctgcaggtagcaaaagccagccagggagagatagcagatgtgtccccaagatagtgcctgagcccaaagaacagaccagaagttcaccagttacagacaggagaatcagcatgggggggaagctgtgtaaacacgcaacctcaccacacaccctgcaacattttagggacaaacacaaggggcagcgctttgagcatgtttctctttgggctgttaccaaaagaagctatgtaaattcaacagggactttttaaattaaattggatgacactaagatttaaactggatgggattagaagtcatattttacccaataacctgtggagtgggttcaggagaagaccagatcaaagtaaaggcatggtggctcacacctgtaatcccagcactttgggaggtgggtggatcacctgaggtcaggagttcaccagcttggccaacatggtgaaaccccatctctactaaaaatgcaaaaaagatagccaggtgtggtggctcacacctgtaatcccacttattcgggaggctgagccaggagaatcgcttgaacctgagaggtggaggttgcagtgagccaagattgcgccattgtactccagcctgggggacagagcaagactccgtttgaaaaaaaaagaaaagaagacaaagtaaagagtcacattttctctgtagaatgagttaaatagattacctggccagatgcagtagctcatgcctgtagacccagctactctggaggctgaggcaagagggtgccttgagctcaggagatcgaggttgcagtgagctgtgatctcactgctgtgcactagcctgagtggccgggcaacaccatctctagttaattaattggctaattaagtaattggtgcttttcttgtccccattttacagatgaggaggtggggcacaggatggatggaaactttccacagtcacagaactaataagtggtgctgaggactcaaacccggggaagcccactctagaacccatgctggtcatccatatccccaaggccctggtcagaacacagctaagcagatggcttgggtcatcaggacgtccattacatccaaaggaagacagcctgtgacgtttcaaaagcaaaagtcccctaccagccagtgaagctacctgatttctcagtatcttacgcccagtgacacgatctaccctcaaaacttaaaaaaaaaagggaaacataaacacataacagcagcagcaataattaaagatgagatgagaacaattaagaaaaaaggaaaggtctcctgtgactgttttatttttagggaaacagagaggaagaagaatgatttttcttttgatgactctatatccaactctgaggtttgattaaagaaatgaccttgaaccacagcaaagaaaaataaaagacaatttccagtaagtatgccagttcgaattaatgatttactttttatttttaaactgaattcagcagagatttacatgcattacgatgattaacatctgaaatttgaccttgaaataatctttacattgtaaattcttaatgatcaaaacaaggttctcagtgattaaaacatattagtaattaattattaaaggagaataattgcaaatacaacattcctaaaatctcaaggcttttaaagcatttgtacaaatgactggacattttttaaatttgaaaaaaaaaaaaagccctccatctgattctcattttcattgtcagtgcaacaacaaaaaaggtatgcacttctcttctcattttccactgtctcgcaagctagaaattctcacgactacctttgatcccatcaaagccaaagaaagaaaagaaaattgttctgtacagatatatgacattaaaaaataatcccaaaaacttcttctctaaggttaataaaaggtcggcagttttgatcacttttaaaaatcaatttataaataatttagtcacttgtagatgggacatgatcttcctgctatccctaactactctgatgccaaaactggtcatagcacaagtggggctgcatagcaaactgatccgcccaaataatttctactgggttataagattttaagaaataaccatgtctcacaccatagagaaaaacaattcaaccagatatctgtcccatgtattgtaggtactctctgtcaaagctgtaactctttttaacttggatggtctcacctagagtagatttcttgttgacagaaggaaccccagaatgtgtacaggccagggccgattgtgacttccattggccaaggttgtcccagggccaggacaagggccacacaggtgcactagcctcccaagggctgagcatgtgtgctcaaccatctggaggaagataaaagtgcatcccctaaattctgcccaatccagtctcttgtccatggagtttcattagaagtgacaaagttgaatgaagaaaaacaaaaggcaactcgccagaacatttcatctctgtcatgttctgcattgtcaaacattactttttgcaatttgctctttgttgatctttatctttttttccaatataaaggtgcaatatttgaaatggtgcctgtattaattttctatcactgcataacaaatgaccataaacctagttatcttagagcagtacaaatttataatctcacagtttctgtaggccaggagcccagcacatgttaagtggattctctgctcagggtctcacaaggctgaaatcaatttgctagccagattcatcttcatgtggaggttcaactgggaaaagtgccatcttcaagttccatcaggtcaatggcagaattcatttttctgtggctctatgattgaggtccccattttctttgctagccatcatctaggaagcattctcagtgactagaggctgctttcaagcccttgacacatggtctcctcaatgggccctctccacttcagatctatcacttcagaaaggatctagacagttaaggactcacctgattaggtcaggcacacccaggatggtctttcttttaattgcctcataatcagctgatttgggaccttgattatatctacaaaaccctttcacatttgtcttataacattgtattcattgtcccatccacacttaagaaggaaggagattatatagggtatgttcaccagaggcaggaatgggggccatcttagaatgttatttgttgcattcctctggagaaccctggcacatacacaaggttagtgcatgagtaacaattcgggtccactgtgcatctctccaaacccaatctgtcctgtattttaactaccttcacacaaggggcaagaatgttaaccctcaaggatgctgaaatattcagttcagcccagaggactccggcagacttgaattccatgtaaccttgaggttgtcattagtttactttacccagaaaccagtgactgtcacttctccctcgggagacttttctgtaggcacaattagtgttctcagcctgatgacacagaaagtggaagacaataaacagaaaatgctcctgttgcaatggatatgatattaactatcagacatgctttcagctgcaaatgattaaaaccctaagcaaacgaggcttaaacaacaacaaagacatgtccatacgaggtatggagacagagaggctccaggttaattattcaattactcataaagtacgtgggttctttccttctttctcctctgccacccttaggatgttgacttgggaatatctcccactatattcccagagaggctgccatagatctaggtatcacacactgatgacatctagaagcacaatgtggtccttctcacttgcctctttttaccttttagaatagaggctgagaagagctaaattgcagtgcaaaatagtgaaaaacaccaatgcttcacaaattcttccacaaaaagaagatgaaacacctccaaactcactctgtgaggccagtattaccatgataccaaaaccataacaaagatattacaaaaaagaaaactataggccaatatcctttatgaatatagaaacaaaaatcctcaacataatactagcaaactgaaaacagcaacataaaaacaggtttatgtactatgaccaagtgggatttatctcaggaatacaaggttggttgatatgaaaatcaatcaatgtaatacactttaatggaataaagtgcgaaaacacatgatctgacatgaaaaaagcatgtaacaaaacccaacactcttccatgataaaaaacaatgaataaagtagaaatagaagggcaccttacaaagggcatacacaaaaactcatagttaatatatttttcactgtaaatttacaaattataattgtatgtatttatgaagtacaaagatttatgatatatttatacaatgtggaatgattaaatcgagctactaacatactcatcacctcaaatacttatcattttttgtggtgagaacatttgaaatttactctcagcaattttgaaatatacaatacaccattgttaattataggcaccctgttgtgcaattggtctccgaaacctattccttctgactgaaactttataccctttgaccataacctccctgttcttctcacaaccccagcctctggcaaccacctttctgctctctgcttctgtgagtttgattgtttcagattccatatacaagtgaaatcatgcagtatttgtctttcagtgcttgacttattacatttagcataatgtcctccaggttcatccatgttgttgcaaataagagaatttccttgttttttaaggctaaatattatcccattgtgtacataccacattttctttatccattcatccactgatgaacatttaggttgatttcaaaacctggctattgtgaataatgctgcaaggaacacaggagtgcaggtatgtctttgacatactgatttcaaatcctgtggatatattcccagagattactggatcatatggtaattctatttttagtttcttgaggaatcttcatacaattttccctaatggccgtactaagttatatgcccatcaacagtgtacaaggggtcccttttctccatccttgccaacatttatcttgcatctttttgataatagccactctgacaggtgtgaggtgatatttcattgtggttttaatttgcatttccctaatgattagtgatgttgagcactttttcatatagctgttggccatttgtatgtcttctgtttttttttttttttctttttttcgagacagagtctctctctgttgcccaggctagagtgcagtggcatgatctcagctcactgcaaccttcacctcctgggatcaagcgattcttgtgccctgccacttgagtagctgggactacaggtgtgtgtcaccacacctggctaatttttatgggtttttggcagagacggggtttcaccatgttggccaggctggtctcgaactcctgggctcaagtgatcccctgcctcggcctcccaaagtggtgggattacaggcgtgagccaccgtacccagcctgtatgtcttcttttaagaaatgtttattcaagtcctttgaccatttttaactgtattatttgttttcttgctattgagttgtttgagttccttatagattttggatattaaccccttatcacatgtatggtttgtagatatgttttcctaatctataggttgtttcttcactctgttacagtttcctttgtggtgcagaagctttttactttgaagtaatcccatttgtctatttttgctgtgcccgtgattttggagtcaaattcaaaaaaataattgcccagaccaatgtcatgcagttggacccttatctcttaacatatacaaaaagtaattgaaatgaatcaaagtcctgaatgcaagagctaaaactctaaaactcttagaagaaaagaaaaataagtataagccttcatgaccttcaattaggcaacggtttctttgatatgacaccaaaagcacaaacaaccaaatgaaacaaatagataaatcgggcttcatcaaaatcaaaaacttttgtgcttcaaaggacactgtcaggaaagtgcaaaggcaacccacagaatgggagaagatatttcaaatcatatatatctgttaagggtctagcatccacaatatataaagaaatcttacaactcaacaataaaaggataaataattcaattgttaaatgcaaatcaaaaccacaagatacttcctcacacccactaggatggcttcaatgtaaaagacaaaaaacaagtgttggtgaggatgtggagaaactgggaccctcatacattactggtgggaatgtaagataatgcagccactttttttttttttttaagacagagtcttgctctgtcacccaggctggaatgcaatggcatgatctcagctcgctgcaacctccgcctcccgggttcaagcaattctcctgcctcggcctcccaagtagctgagactacaggtgcatgacactatgactggctaatttttgtatttttagtagagaaagtgtttcaccatgttgcccaggctggtctcgaactcctgacctcaagtgatctgcctgcctcggcctcccaaagtgctaggattacaggtgtgagccaccatgcctggcctgtgcagccacttttaaaaacagtttggcagttcctcaaaattccactcctagttatatatccaagagaattaaaaacacatgttcacactagaacttgtatagaaatgttcatagcagcattattcataagagccaaaaagtggaaacaacctaaatgaatgttcatcaactgatgaatggacaaataaaacatgctatatcatacgatggaatattattccacataaaaattaatgaagtacagatatatgctgcaacatgaactttgaaaacattatgctgagtgaaggaagccagtcaaaaggccatgcattgtatggttcctttatattcctttattacatgacacagatccctttattatatgaaatacccagcttcctttattatatgaaatatctagaatagataaattcgtaaagacagaaactacgttggtggatgcctagggctgaagggaggctgtggtaggtagtgactgctggtgggtaaggtatttcttttgggggtgatgagaatgttctgggatgagagagtagtcatagttggacaatgttataattatactaaaaatcagtgaattttgcacttttaaagagtgaattttatatgtggattaaatcttgatttctttttttctttgagatggagtctcgctctgtcaccaggctggagtgcaatggtgtgatctcggctcactgcaacctccacctcctgggttcaagtgaatctcctgcctcagcctcccaagtagctggaactacaggcacgtactaccatgcccagctaatttttttgtatttttagtagagacagggtttcaccatgttggccaggatggtctcgatctcttgacctcgtgatctgcccacctcagcctcccaaagtgctgggattacaggcgtgagccaccgcacctggcctatatcttgattttttaaaacacaatgagaattcgaagttcacaagaatgttctgaaagggatgtggtgaggataagagagaaatgaaggagaaggggtgagatcgtgaggagtacaggcttatgggctggtgcaatggatgagaagtcagtttcataagggctggaaggccctgacacacagagctgctaaggtgcaattttaagttgacgctgctgtgtgtaacagggttccccctccaatccctcttctgagactgaggacacaagctcagaaaacagcagggagcctttggtgattacacctagagaggagaagaaaggcatggacgcttagtgtaaagtgtgttggagtgacgcagtgaaggtcttaatactctcagcaggccgggtgtggtggctcacgcctgtaatcccaggactttgggaggccgaggcgggtggatcacttgaggtcagaagtttgagaccagcctcagcaacatggcaaaacctcatctctactaaaaatacaaaaattagttggtcgtggtggtgggtgcctgtaatcccagctactcaggaggctgaggcaggagaatcgcttgaacccaggaggtggaggttgcagagagccgagatcgcgccactgcactccagcctgggcgacacagtaagactccatctcaaaaaacaaaacaaaaaaacaaaacaaaaaaacctctagtagagattgaaactcctgtgggagccgtgctcccttcaatagcatactgctccaggataatccaccctgtgtcggagttgtgaaaacagaactcctcagggatctgctatatccaaactattccagagtcccaattgatgagcttttattgcaaaagccattgagaaacagattcttttctcagtgctcttctgaagggtgagcaaatcaatcttacttcctagatgtgtcagctgagtcaagttacccagaaagaaacacaggagaaatgagtccctgacaagcctgggtggaagttccgtccactgctgtcaatcctgcatattttgttccaatccactatttctttaaaattgctgagtaaaatgttggatatgactcaggcatcccgaaaatctcaaatctctgaatattcaacatcaatttaaagaagacacaagatactgggctttttttccccattgtcaaaatatggggcgtatgccgttgcaagttgagtatgtaaaaaaccatgatgctattttatagtcatggaatcaatcatgagaattcacagtcttgtgaacagggacttctcatatttgataaatgacttgattgctgtgtttctgattagcggcttttcaattgcattacaaatgttggaaacatccattagtcagtatttagcaacattttaggaactgattaaagtgaatccgtgtttcagaaacatagaactacttgtgctgtgaactcaacagtgaagatatccaacagatcctttgggaagagagaaatagacaagaatcttaagccaccttccttttgttgttgttgttagagacagtctcactgtcacccaggctggactgcagtggtgtgatcgtagctcactgcagcctcaatctcccaatctcaagcaatcctcccacctcagcctcttaagtagctgggactacaggtgcacaccaccacacctggctcatttttttttcgaatttttagtagagacgagctcttgctatgttgcccaggctagtctcaaactcctagcctcaagcagtccttaagcctcagcctcccaaagtgctgggattacaggcatgagccactgctcccatcccaggccatcttctgcatgtaatttaatttctgcaggtttgccagttggcttgtcacttttacccagaagtatctgagagagaaaaaaaaaaaaattaaagcaggtgtggggcaagagggaaggcagacacaaacgcaatccaatgttatagtagaagatcactgcttagactatctccatagttcatctttgctttggtttccatcttaatttttttatgtgaaaagatatacatatatttagaattagccagctggactcagtttagatgatcccaattttgttggcaacatccaaagcatcataatcaggagccagtggaacatatgccttcttctctccatcaggccgaatcagggtgttgaccttggccatgtcaatatcatagagcttcttcacagcctgtttgatctggtgcttgttggctttaacatccactatgaacacaagtgtgttgctgtctcctatcttcttcatggccgactcagtggtcagcggaaacttgatgatagcatagtggtcaagcttgtttcttctgggggcactcttccaaggatatttgggctgcctccagagtcgcagtgtcttgggccactggaaggtgggtgacgtgtggatcattttttttgtggctgtggacacctttcaacactgccttcttggcctttaaagccttcgctttggcttcggctttaggagggcaggagcttccttctttgctttcggtgccatcttgtgaaaagcccatcttaatttttaaattgagattggtaaagtttttctatttcttcatagtaaatattttcagctttgcaggccatacatagtctctgttgcaactactcaactctgcctttgtaagaacgaagcagctataggcaatatgtaaatgaagggtgtggctgtgtttccatgaaactttattaataaaaacaggaatcaggggccgggcacggtggctcgtgcctgtaatcccagcactttgggagggcgaggtgggaagatcacttgagctcaggagttcaaaaccagcctggccaacatggtgaaaccctgtctctacaaaaaatacaaaaattaggcgggtgtggtggcacgcacctgtagtcccagctactcaggaggctgaggcaggagaatcactttgaacccaggaggcggaggttgcatgcagtgagccaagatcgcaccactgcacccagcctgggtgacagaacgagactccatctcaaaaacaaaaacaaaaacaaaaaacaggcatcaggttggatttggcccatgggtcacagttcatcaacccagctcttcactatgctagaatcaagagccatgattatgttttacaattttgatagctgctgacatcactgattgtatgtcatatttaccctacttcagaccaacatttatttccttttctttttgtacattgccagattacattgcgatgctatatcacaaatttggaggtaccacattttaatgggaaggaaatattacgatatggagacaaatatacatcactccaagcctccccaccgctatcctctacccccatgaaaatgaatgattgtggaggagtggagcaagttttcagtggaaatagtgaaatgattctaaaatccctctttttccaccgagcatggtggttcacacctgtaatcccagcactttgggaggctgaggcgggtggataacctgaggtcaggagttcgagaccagcctgaccaacatggtgaaaccccatctctactaaaaatacaaaaattagctgggcgtggtggtgcacgcctgtagtcccagctactcgggagactgagacaggagaattgcttgaacctgggaggcagaggttgcagtgagccaagataccaccactgcactccagcctaggtgacggagcaagactccatctcaaaaaaacaaaaaacaaaccaaaaacaccctcaaaaaaacaaaagaaacgcttcgcttctcctcctcagtccttaacttcctctcttcttcccctttcagagtgagattttgcgtggtaagatttggggaggcatgttttgatattccttgtgattttgaatgggaggccaagcagggcttcaggaagtggagcccagagctggtgttcctgggcttggtgacaggtcctgggcccctccctgtctgaggataccattctatgtgtccccatgacaactccgaggtttgatgctggtggagctgattgcttccatgagggcttcatagtctaattctagcacactctccatttctcaatggaccactccaaaaagcttccctcgaaggatcagtctggccaagaaaaacttgcatggccctgggtaccaccatttctacctgcacagctccggacaaccgcagaatcctgatgcccgctctatgtgggaccatgaaaggccctctcgatgttgtcctgctctcagatttctttttccagaaagttcagctgtggctcccatttctactgctatgtaacactgctgtgctcaggctggggaagcccctaattttccaacagggaaataatcttgtacattgagaccaaccgtaacattatcccaagcagctatgagatgtgcacaagtaatttgttattaatccaaatttagccttctccctgacataaaattaaattatgccttcaaaagcctaaaatggcttaaacattatccctaaaataatgtcacttccgatgtgctttctgtagtgaaaaaaaagaagttaggtgagaatgaatgaaccacctatgcttcccctcacaacccagaagcccttgatccacagtgagcagccgtgggaaatacaaattgttctgctgcttgcaaggtgtggttttatagtttctgttgttttcttttgcatttcattctgaaatatattctttttttttttttttttgagacatagtctcgctctgttgcccaggctggagtggagtgatgtgatctcggctgtctgcaacctccgccttccaggttcaagtgattctcctgcctcagccttctgagtagctgggattatagatgcccgccaccacacctggctaatttttattttgtatttttggtagagatggggtttcaccatggtggccaggctggtcttgaagtcctgacctcaagctatctacccccctcagcctcccaaagtgctgagattataggcgtgagccaccgtgcctggccctgagatagatttttaacatgaaagatgtcaaggctaaacacacgtgagtaacccctgcactgctgatgaacgaatatgccaccctgcctctctccaagcaaagaggagaaacctgccatcaggctgtatgaactcttctttgcttttttccagtattgtcattcagattagctttcatgcacgtaccacaagaaaaatcagatgtcctggatttgtcctgtgttcctcatcagcagaggaagccactagcagcccttacgagaatcaaggctactctactggaactcttcttacatagccaaaaatgtgtgaattccatttactgtgatttttaacaaaaatgtgtttatttaaatgtgtttattgtggtactcgcttgcttaattatcttatttattttatttgttgtatttttgagacaggttctcactctgtagcccagactagagtgcagtgatgcgatcctagctcactgtagcctcaacctcctgggctcaagcaatcctcctgcctcagcctccagaatagttgggactacagctatgtgccagcacacccagctaattttttttttttttttttttttttttttgtggagacggggtcttgctgtgttgagcaggctggtctcaaactcctggcctcaagtgatcctcctgcctcaccctcccaaagtgctgggattacaggtgtgagccatcactacccttggcctgtttgcttaattatctgtggaatacagaaaaagaaaaaaatcaatactctttaaaaaaataatctagtccttaaaacacatttttagaccggccatattggctcacacctgtaatcccagcactttgggaggccaaagtgggtggatcacttgaggtgaggagttcaagaccagcctggccaacatggcaaaaccccatctctactaaaaatacaaaaattagccaggtgtggtggtgagcgcctgtaatctcagctactcaggaagctgaggcaaaagaatctcttgaatccaggaggtggaggttgcaaggagctgagattgcaccactgcactccagcctgggtgacagaatgagactgtctccaaaaaaaactaaaaaataaaatacattttaaatgattttcagtgactagtttttggagacctttacatggctgctttactcatgtggatgaatgtgtttatcaatgtccctggggaaaataaaagcagcgttatttgccttacttccctaccagatttttgatattttctcaaaatcagctgggtgcaggagcatgagcctgtaaccccaagctctactcaggaggctgaggtgggaggatcagttgagcccaggaggtcaaggctgcagtaagctatcactgcaccactgcactccagcctgggtgacagagcaagactctgtttctttaaaaacaaaacaaaacaaaaaaatcttatattttctcaaaatcggagtccactcatgggatgtgtcattttattagctatatatatacatctatgccgtttggatttgaatgtcatccattatctgttgcagtgggttgaatggtgtccccttcccccaaaaaaagacatgcccaatccctaagtcccagtacctgtgaatgcggccttgcttggaaatcatatctttgcagatgtcatgaagagaaggatctcaagttgagattatcctacattagttgtgtgagccctgaatgcaatgaaccttataagacaaaaggagaaacagatacagaaagagacatgggagaaggtgatgtgaccacataggcagagatgggagtgacgcagcagcaagccagggagccctacggatggccggccgccaccaaaagctgggagaaaggcagggaacagattctccctgagagcctttagagcaagcacagccctgctcacaccatgatttcagacttccagcctccaggactgtgcaagaataaatgtctgttgttttaagccaccgagcttgtggaactttgtaacggcagccctgggaaactaacacctgtgggtcgaggcagggaaagaaatgctgccccagtatagagaagatttgctccaggttctaggagagccaaaaagcagcatctcatggccgtcagcaaacccctgggaggacggcagaccccagggggcgagcaaacttgctggtggttggagcatgcctgatgctatcactctgtgggtaccaagtaccaggcaaacaggtaggccttgttcaaagccagtgatggagagaggcactctccaacagagccatcgaacagggcacgtactgtatcagctctagcagaggccagcaaacttttctgtaaagggcttgatagtaagtattttcagctttgtgaaccacaaaccggagtagtctctgtcacacctcctcagctctgctgttgggaagtgaaaccaaccatatgcaactgccaaacaaatacacgtgaaaatctttatttacacatgcttcgctctatacccaaaaaaatgtaaagcagggactcaaacagatacttgtatatgaatgttattctcacaatagccaagaggtggaaataacccaggtgttcatcaatagatgaatggacaaacgaaatgtgtagatacacgtacatgcaaaggaatagtatacagccttaaaaaggaatgaaattctgacacgtgctacaacgtgggtgaaccctgaacgcatgatgctaagtaaaataagccagacacaaaagtaaaaagatcgtatgactgcacttacatgaagtacctagaacaggcaaattcatagagatagaaagtagaagttactagaagctcaggaaagtgggaaatggaaagttaccgattcacggtacagagttcctatttggggtgctgaaaaagttttgaaattagatagtggggatggttatacaaagtgtgaatatactcaatgccactgaattgtacaatttaaaatggttaaaatagtaaattttatgttatacatattttgtcataataaagtttgcatttagaaaaaaaaaatttctttcaaacagagtctcactctgtcacccaggctggagtgcagtggcatcatctcggctcactgcaacctctgcctcccaggttcattctttctgcctcagcttcctgagtagctggaattacaggcatgcatcaccacaaccagctaatttttgtatttttagtagaaatggggttttgccattttggccaggctggtctcgaacttctgacctcaagtgatccacccagctcagcctcccaaagtgctgggattacaggcgtgagcaaccatacccggcttaggaaaaaaaaaaattatttacaaaaatagaaactggccatagtttgccaactcctggtatagagttttctataacatcaaagtggctcttggtatgtgactgttccagaattatcccagcatagcagatatgaggtggtacttcctatgagctctgccatcctcagtccctggactgtgtcatttcctttgggcatgtgcacatacacccctggaacatggaggaaggcatattaatagcgggtagtatggatttaaaagcctcagaaccgtgtcattgatgctatgctctgttcctggaagtgaaaatgcacagaggaaccagctggtacagtatgatgacaacagatttagggtacccagtcaccattcactgcatggcctcagtcacgttatccctgctctctgggcctcagtttaatcagatgattctcatttgctggctatatgatgtcctgctctggaaaagcatgtagcttagaaatgagactgcatgtgaaggtattacaccaccccccgtggatggctgccaccatccttaagcatattttcatccagaagaataaacatccttagagaaatacacatgaaatgcaaagcttgaagtcataactcaatgcataacaacctgcaaaccagtacaggcttatgagctagctaataaaataaatcatagtcatgtttttcaaatgacttttcatgtgttgtcattacttctccgacgtactgtaaattaactgtgaagtgctacttcctgcagggaggttttctttcccctcccaaatataaagaggttgtaaggctaaagaatgcagacatgcatcatgtctgcgaaaatcattttttaaaaagatcaaatgtaatattttctttcaacatggacaactgctttgagattttccattcaagcagccttgaacacagcctccagcgtttgccaattactcctgacaaataccatttgggcctgagtgatgttgtaagtgaaataaaacagtggaaggaaaaaaaccagaacatgataaaaggaattttttttggtctgctgagaacttactgtaagttatacattcaggagtgaaggccctgcttcctgccagtgacggactccatgtgagctggagtttgaaggtgacttttgtttgacagtaataggaagggaagacaaaactcagttttcatgtcccttgaaagggagtcagcccttttttctccctcataaagaggaaaaaaaagtatataaacaaaagaagagaaaaagaggcactaggccctgttccctgtcattctgcacaatacgcactaatggctgaaaacaatcccatgaaatcagcgtggccagcatgcccgggcggccagcagccccacctgcctccgtacctgagctctgagcatgttagaaccagctgaaggcaaccaaagccacaggaaagagagggcacagccaactttcaaagtgcagtcatctggtcccacccccacccccctacccccatctctcctgaagtttcctcctttttttttttttttttgagacagagtctccctctgttgtacacgctggagtgcagtgctgcaatctcggctcctgcaacctccacctcctgggttcaagtgattctagtgcctcagcctcccgagtagctgggattacaggcacccaccaccacactcgactaatttttgtatttttagtaaagacggggtttcaccatgttgaccaggctgatctcaaactcctgatctcaaatgatctgcccgccttggcctcccgaagtgctgggattacaggtatgagccaccgtgcctggccaagtttcctccttttctgaggttcctgtcccagaatctatgatggccaagacaaagcaaaggtgaagactgctccccctccaccactgcctttcccaacatccttctctgcttgttctttaagattccagtgaaactcaaccttgacctcagtgctgtggggaatcagagagcagccaggggaaacgactggaaagaggctgggtggtaactgggcacagtggctcatgcctgtaatcccagcattttgagagacaaaggtgggaggatcacttgaggcctagagtttgagaccagtctgggcaacatggtgagacccccgtctctacaaaatatttttagaattagccaggtgtggtggtgcgtgcctgtagttccaactgctcaggagacggaggcaggatggttgcttgagctcacgaatttgaggctgcagtgagccatgattggccgttgcactccagcctgggcaaaagagcaggaccctgtctctcaaggctgagagggtaccaagtgcccacatggtatccagcagaccaggacccagagctggtctgtctataccagccacgaaccttggacaaggaagggactttgctagctaataaaaataagctggactgactgactgagctggactttccccatctgttgggggagactattgtagccactgaggatgaaactgattcagggctggcagcctgtcgtactgtgctggcacctggaaatgctaagtcaatgccacggtccagtctgaacatcctgggacccctccactcagggtgcaccagtcctaatgcacctgtggagctcggcgattttgtaaccacactgctgcactgggatctatttttcccggtgaatgaaaaactcacaaatgtgagtgatttaggctggaggtccgcagccccacggcgcagaggctccccagcatgtggtgtgagtaaggggctggtggctttctgtccagctgcctcccacttcaagaagtctttggcaactgccatgccccaaagtaaaaggggcaaaaccatggtcattgtgctgataatcgggcctcgtgggtcctctgagcagaaccccagccccgcctcactttctgtaaatgagccatctccactggcacctcgtgtcaaggaagggtgaaccaggacagggctaaagggattgccaatggacagcccagaagacaggtcataaaccgcccaactggctcgatgtctggagtcggtcacacctcgaagacactgttttcctaactttcacgtacacgggaatcttgttccaatgcagattctgattcagtgggtccagggcagggcctgagatcctgaatttcttttcatttgtgtgtgtgtgtgtctgtgtgtgtttgtttgtttgagatggagtctcgctctgtcacacaggctagagtgcagtggcacgatctcggctcactgcaacctccacctcccgggttcaagcgattctcctgacctcaagtgatctggcttagcctccccaggtagctgggattataggtgccattaccacacccagctaatttttgtgttttcagtagagacagggtttccccatgttggccaggctgatcttgaactcctgacctcaggtgatcctctgcctctcagagtgctgggattacaggtgtgagccaccacgcccggccaagatcctgaatttctaataggctcccaggtgctgctgatgtgctctgcagatcaccctgtgaggagcagggttctaaggcaaacagccccaatcaacaaagctgaaagcacttatttagcttcctgggggacattttttggtggtagtggcctcctttatagacttttgccctggtgacctataaaagaaagaagatagatcctagcagttgccccctgccagtacttttctcctgctggtatcagagacactgccttctaatacagagacacagtatttctcctctcgcacgactgctgccatggttgtgagtcaagactccctgcctagactacatggtggccacctactcttaacattgaaccacaaccatcaaaaatcacttgtggccaggtgtgggtggctcacacctgtaatcccagcactttgggaggccgaggcggttggatcacctaaggtcagaagttcaagaccagcctggctaacatggcacaacccagctctactaaaaaaaatacaaaaaaattagctgggagtggtggcgtagtgcacgcctgtaaccccagctacttaggaggctgaggcaggagaatcacttgaacccaggaagtggaggttgtagtgagctgagattatgccactgctgcactccagcctgggtgacagagcacgaaactgtctcaaaacaaaacaaaaaaaacttgttattccaacctgaatactttttttttttttttgagacggagtttcactctttttgcccaggctggagtgcaatggcgcgatctcagctcaccgtaacctccgcctcccaggttcaagcaattctcctgtctcggcctcccgagtagctgggattataggcgtgagccaccgtgccctgctaattttgtatttttagtagagacggggtttctccacattggtcaggctggtctcgaactcctgacctcaggtgatctgcctgcctcagcctcccaaagtgctgggattacaggcatgagccacctcgcctggcttactctttttttttttttttttttttttgaggcaaagtcttgctctggcgcccagactgcagtacagcggcatgatctaggctcactacaacctgggccttccagattcaagtgattctcatgccttggcctcctgagtagctagcattacaggcatgtgccaccaagcctggctaatttttgtattttttcagtagagatggggttttgctgtgttggccaggctgatctggaactcctggcctcaagtgatacgcccacctcagcctcccaaagtgctggaattacaggcatgagtcaccatgcttggccccaacctgagttctcttaaataatatctgcattccatatacataatcaccatcaccagtgaggcaactccaatcagataaacagtaatgtatacctttctctactcctccaattaaaaaaaaaaaaaccttcaatatagtgatattgaatattggcctcatcgaggtcttggtagcactctgtagatcaacatgccaaagagaaaacaaacttccactcaacacaaagccagaatgtgtatcaatagcacggggctggggaggagaagggtatcaggagggagaaaagcattatagcagcttcccggttcacaagttgaatttgtctacacataagaccagatgacagagcttctgataaagtccagctgaccaaagaaatcatttcaagtgaggccatcagcgtcaagtcatcatgtgatgttgtactgagtcagtccacatcaccagccatttggggatctacagtgtctcagtatcctgtggacagagaagctcaagcgcaccctgatggtttttttcactctaccttgaggccccaacctctgatcagtcatgcacctctaacaaagatgggccaggcctcccctcggtcagcagaaatggattctttccacctcaccacaaaatacttcacgttattctagaaacacctggcagatgagaagctaggagtcacaggatccgtccctctgtttgtgtgggtggtcagtttcaactccttaaaagccatccttctggccaggcacagtggttcacacctgtaatcccagcaacttcctagcactttgggagtccgaggcaggtggatcacctgaggcctggagttcgagaccagccccatctctactaaaaataaaaaaatcagccaggcatggtggtgcatgcctgtaagtccagctcttggcgcatgcctgtaattccagctactcggaggctgaggcaggagaattgcttgaacctggggtgcagaggttgcagtgagcagagatcgccccattgcactccagcctgagcaacaagagtgaaactctgtctcaaaaaaaaaaaatccttcttttggcctgcctgaaacagcctgagtctacctgctatcaattaggatagaaattgaaacctgctacccggtgtgaaaagttctctccttctcaaaagtaagggctaaatatatgcctttatttgtggctcctctgtgggcagagccaggatggttcctgcacggtctcaccccctcctcctctcgccattacatctgagccaccactgccctctccagcccctgccccacctggccaggtcccttcccgagcagctatcaccttgaagtggtgtttatccgcccaaaggagaatgtgaacgttggcattttcttccaggggaaacacggagagttgcttctgccttgtttggatgctactaatatttgggaaaaccactctctgctgcctgacttgaccgagccgcagtacccaggtcagctcggcggtcctcttgcgccatctagtgtacgaaaggtggaagtggctcaagcacgttgcaaagtcccacagggattccaagatccacctggtacttaccaagcatcagcccaaacactctggacacggagaggtgtggcgccttttaaaggagacacgtggaattaaatttgctaatcacttctcgtggactgggcgggcactccaactgtatttactgagccaaatgataaagagttgatctctggattcatctgtactcaacatgaagtggtactatttaaaagatcatttaggcagcatgaacttgtgtagtataagaattgacacttggccaggcgtggtggctcccgcctataattccagcactttgggaggccaaggcgggtggattgcctgagttcaggagttcgaaaccagcctgggcaacacggtgaaacccccatctctactaaatacaaaaaattagctgggtgtggcagcatgcacctgtaatcgcagctactcaggaggctgaggcaggagaattgcttgaacccgggaggtggaggttgcaatgagccgagatcacgccattgcactccagcctgggcaacagagcaagactctatctccaaaaaaattaaaaaaaaaaaaaagaaaagaattgacactcttcagcttgcctcccacacctctgaaaaccagaaagttccagctgggaaaaggtaaggcagcttgctcccatatcccagaggttcagaaagggaactttggtgaacatcagtcatgtgggagctttaaatctccactgccccggcacacctcaggccaactagttcagacccctgcagtgggaacccggcctcagaattttttaaagctccgcatgtgattccagtgaacagcaaagccgccaaccactgctacagcctttaccatcagaggcttggaaggcaaagacgtccagtgacacaggtctcagacatggcacgagaagcacaggtctacgctgcctgtcccaaacacagtcgccttagacccaacctgcttcctctgtgacatcccaaactctctcttatctgtcaacagtttagtctccctttgtgattatcacagtaaaaactggaattgttgactgtcccaagcattactgagtggggtctttgccgttctggtcttggccctatcttctgaatctgggcattaggaagagatttcagggttctgagcagtttctatggcaccgagacaatgctttcaactgcaacaggagagcctctcccctgagacgaattccacggaaacgagaaaaggcctgctttgggctcactcaccccttctcagccctctaataacagctatgccctgtatgagatatgagctgtcagtgtgatgagaagcgggctgtaaaactgaaatgggaccatttgaggcgaggctgcagcgagagagactggctcactctgccctgcagcagggccagggagtggagttgcctggttcctccagaacagcctgcaaggtgaagtagtcactcggcctttcacaaagcaaaaccagacaacataaactgcttgaaggtggcgggtcccctcccttaccctagactgcctaacttaggaggcagaaacaggtatcactcacacatcagaggcaggaactcagacaccagacactgctggcttctaatccctgccacgtgatgtgggagaagtcagttgacccgtctatgcctcagtgtcttcaactctaacaaaagatggaatacctgcctcatagagctattgtgacaattagatgagaaagagggatatcccaccgggtaccaggaggacacagtggctctaagtcccactccaccttttttttttttttttttttttacagtcagggtctcacttgtcgcaggtgggcgacaaccatttgagccagtggcatgcaggggtaaaagaatttaccaagacagctgtaggtaaagaaaggcagatttacgcgaggaagaatgaaaacacgttgttaggaggcaacgggcagatcagcggaggaggagctgactgccagagacaaaggctcctggagattttataggatggtttcggctacatagggctgcgcacaatactgataacgccagggctgcaaggagctaacgtgcatttttctatcagccaaggtgtctgatgataaacggaagtgtttgatgttaagttgggtgcaggaggattgtgggtaatgtacgttatctgcactggagggctatgtgtcctggaccatgaagaaaggtaggccggtaacttatctgctttatctttaactccctcagtcccgccagcctgactcctttgccctaaataggactccacagatttgtcatccaggctggagtgcagctgtgtgatcacagctcactgcagcttcgaactcctggactcatgccatcctcctgcctcagcctccagagtagctaggactacaggcatgcagcaccacacccagctatttttttattattttttgtagagacgcggggcagggggtctcactatgttgcccaggctggtctcaaacttctggcctcaagtgatcctcccacctcggatagtaacagcacctgctactatctaccttgtggagtggtagccttacatttttattaaatacattctattttggggagttttttgtttttttgagatggagtctcactctgttgcctgcgctgaagcgcagtggcatgataccagctcactgcaacctccacctcctgggttcaagtgattctcctgcctaagtctccggagtagctgagattacaggtgcccgccaccacacccagcttattttttgtatttttagtagagacagggtttcaccatgttggccaggatggtctcgatctcctgacctcgtgatctacccgcctcggcctcccaaagtgctgggattacaggcgtgagccaccgtgcctggcccaggtgtttttttttttttttaattttcttatagcctaatgttaaaactacatagaataaaaggatattaaaacaagaaaatagtgaaaggttacaacaggaagatgagaaacaccctctgaaaggtgagagggatgagcacgggagagaaatgtctgctggtgggggcaggtgctggcgtgctgtcagtggaactctagcatgtctgggggacactggcatgtgttgtgtgggggacactggcgtgttgtgcaggggacactggcatgtcgtgtgggggacactggcgtgttctgtgggggcaatggtgtgttgtgtggggacactggcgtgtcgtgtgggggacactggtgtgtacacgggacactggcgtgtcgtgcggggggacactggcattttctgtgggggcaatggcatgttgtgtgggggacactggcgtgttgtgtgggggcaatggcgtgtcgtgtggggacactggcgtgtcgtgcgggggacactggtgtgtacacgggacactggcgtgtcgtgcggggggacactggcatgttctgtgggggcaatggcatgttgtgtgggggacactggcgtgttgtgtgggggacactggcatgtcgtgtgggggacactggcgtgttctgtgggggcaatggcgtgttgtgtggggacactgacgtgttgtgtgggggacactggcgtgtgcacgggacactggcatgtcatgtgggggacactggtgtgttgtgcgggggacactggcatgttctgtgggggcaatggcgtgttgtgtgggggacactggtgtgttgtgtgaggacactggtgtgttgtgtgaggggcactgatacgtgtggtgagtcgctgtcctactgtggggggaatctgatgtgtgtggggagcactgatgtgtgtgggggtcactgtcctactgtgggggtcgctgtcctattgtgggggctgctgatgtgtgggggggttgctgtcctactgtggggggcactgatatgtgtggggaccactgtcctactgtgggggctgctgtgtgtgggggtcgctgtcctattgtgggggctgctgtgtgtgggggtcgctgttctattgtgggggctgctgtgtgtgggggtcgctgttctattgtgggggccgctgatgtgtgtgggggtcgctgttctattgtgggggccgctgatgtgtgtgggggtcgctgtcctattgtgggggccgctgatgtgtgtgggggttgctgtcctgttgtgagggccgctgatgtgtgggggtcgctgtcctgttgtggggcgctaatatgtgggggtcgctgtcctgttgtggggcgctgatgtgaggagtcgctgtcctgttgtggggcgctgatgtgtgtgggggtcgctgatctattgtgggggctgatgtgtgtgggggttgctgtcctattgtaggggccgctgatgtgtgggggtcacgtcctgttgtggggcactgatgtgtgggggtcgctgtcctgttgtgggggctgatgcatggatacattggccgggctggagaaagatgcactgtccctgcgccttccttcctccgttttgttccttttagttcccacaggactttctgtactgtgggagaaagctcttttacaagggatcccacaggtggcattcctgacaaggctgttcaaatatcagcccacaagtcatgggttctgttacacgttccccctcgggacaaaacctgccgcccagcatttacctatagtacggaaggcagcagctgaccaccgaggaggagccagaatcgcctctgctggaccccatgggccctcaaggggcacggccaggagtttcggtgagaaagtcattttcacacaattacagacctatttcctcaaacatcactgccagcctccacagaggagggcctccctccttgaggaacaccctccacagaggagggcctattctatccttagctggaaagatgatcgaggaatgcctccaatcgcccttaacttcttgctgtctgtcccctcgggccaagtcagcagttggaggtttaccacccaaactcagaactagacaccaacaggggtgcgagtctttaggagcctcaggcccacccaaagcaccagcaaagagaaaaccaagaaagaaagatggctagggggagtccggggagggcggtggtgattagacaataaggaagaaaatagcgccgtcggttaaacagcactgcacgctgcctcaccctagatggggacagatgggtttgctgccctaagaatgacttgacgagaacagcctgccaccagcgtcttttgagtccaaaacaaaagagcagccgaaaggaagcgtatggactgtgagcggtggtttcaccctgtggccagactgcccaacaaggggccacaggtttcttgcaaggggtccgtgacttcacataactagcattgtctacagtctcatactattcttcgaataaatgcagatctgctgtgctgatggagtattactcagctgtaaataaatgcagatctgctgtgctgatgaactattagttgtacatgtttctgggcagctgctttttgtcactgtgtattttttaattttgctttattatttttagagacagggtctcactcagttagttgtcgcccaggctgcagtacagtagcacgatcctggctcactgcaacctcaaactcctgggctcaagccatcctctggcctcacccttccgagtggctgcagctacaggcacggaccaccctgcccagctcattttttaaattgttttgtaggaacgggattgtggggcggggggacgcattacatcacccaagctgttcagaactcctgggctcaagagatcctccacctcagcctcccctgaagtgatcacaggtgtgagcaccacgcccacccactgcgcagtttttctaatcactggacaaggaaagcacaatgaccatgtagggtctgcgaagtttttaatgttcaaggggctgtccgttttgaaaggtgaaaaggaattaacatatttaggtccactcatagggaagaggaaaaagaaattctggcatagcacaggggtcaggaaactatggcccaccacctgtcgttgtcagtagtttccctggagcccagccatgcaaatggttgacatgctgccgatggccgctctgcagaatcgctgggactaagaccacaggtccagaaagcttcaaatggttactatcgggccctccacagaagtctgcccactctccatacagcatatgatgaaatacactgcattatactgaatattgaaaaaaaatatactgcagctactgaaaaataaacacaaagtgtatatacaaacagggaaagatgttcaagaaatcatgagaaagttttattttaaactctgcctgcctcctgaggccagcaggtcccgttcatttggtttcactaggctccaatgagaaaggaatttgagttcttgggaagaatgaaccctgggagggtaaacaggactctgggcaacattgtctaagcggcgtccccagcacgggcctgaacaggaccagcagcccctccgttacttacgcaggcagttccaaggccacaggccgctgagagctgtgcaggaagctctccccacccaaggtctgcgtggtatcaaaactcaagaataagaacagaagccaaaccaccaccatggttcgccatcagctgacctacactgaaccccagaatcaagcagacaggcccaccacggcccagctgtgcaggatgagccagctccccaggtggaaaggcctgcccaggaaagtcgccagaacaaagcagaaagagccgctggctgagctagtcattcttcccaagtgaataattagacaagcgccaccttgagaggccaggagcatgcttagaggacattccctcctcctggaagctgtgtgtcccctagggggctcttcaacacccacctcagtgcagccacacagggaagggctggcgtctgggccaccctggcggggatccaggactacctcacactgccccacacccaccgccaatctgccccttaacccaatggtatcagagcatcttaaaagcacaaccactagactctgatagctgctgtgtcagataagaagcaggccccgtggtgacagaccacacacggacgcagctggctcctggctgcctcacagtccgcctctctcctcacagttcagcactttattcggaagagcattagacctgccatccagacagcttgtccaccttcactcacagcctcacaatcccagaacctgtgctgccccctgcagaaatcctgcatgtcctgggggcagccaccaccccagcccatgatgatgctcttcaaaattaacttttgtttctgtaggaaaagcaaaaggaaaaggattaagttcctaattgttgagtagacacaactcatcgactctaaactatataaatttagtccatcaaaccttagtctaaaatgtgtgactaacacccaccagaggaggtgaccaaatgcgcttcggtgaaatcaggtaaaagctgtttgcaaactgtgcagggtctcggcagatgccctgagaatctttagctcttccgtccacaaggattccaccaaagttagttggtttatcagggcctctttttcatccttcatatgagacacctgaaagttattttttaattattgttattgtagtaaaacatatatatatatttcacagaacgtacgtacctttttaaccaattttaagtgtatggttcagcagcatgaagtacattcacattgtttagatccactgccactctccagctccagaactttttctatcacccaaacagaaactctacaagcatacatcaataaccctattcccctcttccccaaaccccccgtcacctctactccactctctgtctctacgaactcacctgttccaggaacctcacagaagtggatcatacagcatttgtccttttgtgtctggcttatttcatttccaataatgtcttcaagcttcattaaaatcactctttaaatcccaggcatgttttcatacgaataagctgatttctcatttaactaaaacatttactaaataaacacatcaatgagaaagaatgcttgaagtcacacagtaacttttactttttgccttttaataaaaagtaaaggcaaagatatggaatcaacctaagtattcatcaacagatgaataaagaaaaagtggcatatatacccagtgaagtacattcagccttataaaaaaggaaattttgtcatttgtgacaacgtggatgaacctggaggacatgctgtcacacggcaataagccagcacagaatgaccaatattgcatgatctcactatacatggactctaaaatcatcaaactcatagaagcagggagtcaaattgtggtcaccagaggctgaggggttggagagggattagggagatgttgatcaaaagacaccaaatttcagctggaccagaggattaagttcaagagatctatggtacatcgtggtgactacagttaataacaatatattatgtacttgaaaattgctaagtgcagattttaagtgttctcaccacaaaaaaaataagtatatgtgatcatgcatatgttaaatagcttgatttagccatccacgatgtatacctattttaaaacatcatgtagtccactataaatatatacaatttttactgaccaattaaaaataaagaggccaggtgcagtggctcatgcctgtaatcccagcactttgggaggctgaggtgggcggatcacctgaggtcaggagtttgagactagcctgcccaacatggtgaaaccctgtctctactaaaaatacaaaaattagccagatgtggtggcgggcacttgtaatcccagctactcgggaggctgaggcaggagaatcacttgaacccaggaggcggaggttgcagtaagccgagatcgtgccattgcactccagcctgggagacagagcaagactctgtctcaaaaaaaaaaaaaaaatagaaaagaaaaagaaaaaataaaaataaaaaattgagagaaaaagcataggtactatgttaacagtcaaaaatggagcccagatgcggtggttcaggccaggcgcagtggacacttgtaatcccagcactttgggaggctgaggcgggtggatcacttgaggtcaggagttcaagaccaccctggccaacatggtgaaaccccgtctttactaaaaatacaaacattagctgggcatggtggcgggtgcctgtaatcccagctacccgggaggctgaggcaggaggatcgcttgaacctgggaggtggaggttgcagtgagccaagatcgtgccattgcactccagcctgggcaacaagagtgaaactccatctcaaagaaaacaaaaatagagattacatcaacatttatttatttaaggcactaaacaatgctcttatgaaatgcactatccctaataacatgtacaaaacaaggaactgctgaatcaagacacttctttaaggatgtcatattctagaaacataccttttgaagcacagcattagtctcttctatgaaataatagcatattttctgggctatgtccaaacttgtcttctcattcgtatctgaaattacctccccaagaagtacttttttccagcatgtactagaaccaaaatgttccatgacacaattttagcaggctctcaaaaaacagatttttttgtttcagtgcaacacataaactccttctcctatttctccaggagcataatacaactcattccataagcagattccccaaacctccatgccacttgcagctcccatgtggaagccgaccaggtaatgagagaggaggaggaggagctgagaataaaagcacggggggtgggtactctctgcaggcaagggctgaatgttattatcatcacaaacctgtgtctgacccatgagtgaatgaagtcccgttcccggccatgggaacgaagccagtgacagaacaggagggcgagtccacagccgaaaggcagaggactaaggagcaaaggcagaagttttccttcaagtgaccgtctgtccaaaatagtagcaaactgggcacaattcacaaagccaaatgctccatgtctggaaggaggaatctacagcaagcctctatccccatgcaggtcattccagtgctctactacaaaggttcgcaggaaacggggctcagtcagcaggcagggcccactctggaaggtctgctgtggcaggtgcaagggagccacagcaggatgcggagcagaggtggcagcgccagacctagacactagaaagaagaactaccgggagaaagacgacggaggaccggattctgaacaccgagaatctggaagtggaagtggcttcgaaggggaggaaagatggctgctgtggaagtaaacaggagcccattagattcagaacagctggcaagacacagcccggaatagtctcagaaggcttcagtttcagagatgacaggtgaaatgagttctcagtaaagaaaaaggaaatgactgtgtgtcaggcatggtgttcatgaataaccattacctaatttaatcttcacagttacctagcaaagaaagcacgataatccgcatgctagactcaaagaaacactcagcaaagttgaagcactcaccctgagtgacagagctagtgaggcagaaagaactgaaacgccccagccagagccccacacgtgctttctccacacccactcagtaagcggtaactcaaatgcaagaaaagaggcctaaggaagacctctgggaaacagccagttgttgtatttaattttaggctgaagtgtccgaaaaggactcataccttgttgccagaaggatttaaagaagctaacataagtacacacaaaataaaaggtaagatgaatgaaggcagaaaacaagacaaaggaagacaaaaggagaaaagacaagacactgcaggaatgggccagtgcgaaaccgcatgtcccaacactaggtacgtttgcatgcacctcagatttgcctctcagttttccagtgaacaaggaaaagaaggaaacatcggttaaagaattcatagtatctgtaagataaaaacactccatttgctaagaataaaaacaaaaactatgtctagtgttgagaccagagagaaattttactccaaaagttcctagagaaaaagaaggaagcaacatcatctcatccaaaagaagaacaggcgtcactgaaggggcaccgactgctcccaggcactgtgcctcatctcagtcagtcctcccaactgttcaaggacagcctgcaccatcttcaagaggttctccctggatatctagcagcagaaggttgaaggctgctctccctgccagggactcaggctgaagctgcccctacactgggtacagcacagctggatgtgtcgacagggggctgcagggagcaggactgacagcaggcaggaacatgagggagcctggccaggatgcacacccacaccgggggctccccgacctgcctcccccatggaaaagtccagctcttcagccaggtttctggatctcccccagggcaggaccgacgttagggactctagctctacttgtcctgggcaaaacctacctactcagagactttcctctgaacagtgccaatgcccacactttttaaaggatttcaggtcaccagaaggaaaatatgagtagaaacaaaaagattatcaaaactatgtatgctgagtctaaaaccagaattccaaaacggttaaaacttagaaatgaaacattcgctacatgggcaagttacataatgagaaagcaactccaatgtatgacatccctttttcctccctggctgggtatctgaatgcaagccaaaaacaaacaaaccaaccctccaaagttatatctagcctgttgctacagcttaagaccaacacatgtgaaacttacaatttctcagcttccagacataacaacttaagggctgtgagtagcctccaagatggtccatcccatccaaatgtcaaatttctgaagtagaaaaacaaataatgacaaatccatcatttcagtatttcatgacctcatagcaaatgactgaagagccaaacacctttttaaagaggttgctaaatgtcatgtaacctgcaacctcggccaaaggacaagagaaaatcagtctgcaaatacttaagaagaaagcctaagtaacaggaaattctctccccattttttttctaaagagtaaacagctggccgggcgcagtgcctcacgcctgtaatcccagcactttaggaggccaaggcaggtggatcacgaggtcaggagatcgagaccatcctggctaacacggtgaaaccccatctctactaaaaatacaaaaaattagctgggcgtggtcgcaggcacttgtagttccagctacttgggtggctgaggcaggagaatggcgtgaacccgggaggcagagcttgcagtgagctgagattgcgccactgcactccagcctgggcgacagagcaagactccttctcaaaaaaaaaaaaaaaaaaaaaaaaaaaaaaagagcttaaccatggatgaggggccggaggcagggcccatgcacaggagttcccagtaagagaaacgcttaagaactggaactaccctgggcatcccactgatggcagccaccactgccaggctgctctcacaccatggcgggatcatttcaaacttcatttcatccagaaaagaaaatctgaaagggagagccttgaaccctgtttagccacttggcatggaatcacctcgctacccacctaccccaagagcctgcaccatgttgccaggtgcgtgggctctcctgaggcccagcctggcctttccacatgaccacaagggagacagactcaccctgggccacccatcaacacatccaagctctcttttggtaccataatttaatatttctagcttgtatcttatgtccctaaagaagtttctttcaagtgtcttatactccttttgtcctccacaacatcaagcgcagttttactgcacatagtaagtgctcaatacctacccgtcagctgatacagggtcaggaggggtctcacccccatggaaaatttaaccccaggttttccatgaaaatttcctaaaggaataattttaagagggaaagagaaacacttactctatatagccatgatcctttaaaatagaaatctttttgtccatctgtttatctgttgatggaagatatttaacaagtatttctatattcaaaaaaaaaaatcagactgttagggcataaatttggacaaaagtatgtctcccttcccttctcaactcacttcctttccctttagcaacccagacatgcataaacagttccacctaattcacacaaaggaaatctactcttcaagtccaattcagtcacatcagtactgagtccctgaaaggctgtaagaatttcaaggctggaggactaaacacgcataacctcagctcctgctcccactaagtaaatccaccaaaaacaagcaggtcattaggacatcagcatgactgttgaaaatttacagtcaacaaaagtagaggccctgcaaaaacatgaggaaaggtttacaatactgagctttttccaaaccagaattcaaagcagtctggatattagtgactgcaactacaaaaaacttaaagtaaatatgcacaaattaacagagctatttggagaagcagggtaataagggatttttctattttattttaaaaatgtaaatataactaaaatataatttttgctcaaattaatttattcaacaaatgaatacttcgcggacatcaatattaaatttatcaggattttgaaaacatgaagccaatctcgaagctggttttctagcagcaagacccagtttttgcttttctatttttattttgagaaatcacattattattctgcctataagatggagtagtaacagcttggccaagtttctatctccaatcaaatctatatttaaaaatgcttcaaattatatatttaataaggctcttgccgttttttcatggcctagaaaactgcttctctacagtttcagaaagggaaaaatcagtcttctatgtacttttttaacactatatttggaattttcacatcttaagtgtaatggctaacttactattttaaaataataaaactgggccaagcacggtagctcccgcctataataccaacactctgggaggttgaggcaggaggatctcgagcccaggagttgaagaccagcctgggcaacataacaagacactgtctctatcatatgaaaaaacaaatattaaaaatagtaataataaaaccaggccaggcacagtggctcactcctacaatcctagcactttgggaggctgagacaggtagatcacttgaggccagagttcaagaccagcctggccaacacggcgaaaccccgtctctactaaaattacaaaagtagccaggcatggtggtgcgtgcctgtaatcccagctactccagaggctaaggcacaagaatcacctgaacctgggaggcggaggttccaacgagccaagattacaccactgcactccagcctgagcaacagagtgcgactctgactcaaaaataataaaatcaatgatgatggctaggttaatagatcacaaaagaacatacatgaaatcaaatctcaccatggcaacaacctccagaaacaaggactataggtagatttatctctgtgattaacacagtgtcttacccacagtaggtgcttaataaatattttttattcattgctctctaatcctattttctttagtgccagtgacaacgtctcagtataaacatttccatcctttaatactgtatttatttccttagcagttttccttttcttccattctatcttctgacccaatgcaatgaaaacttctcaaaatatcagtcaaaacttcgttgtttttacttcaacactgaaattacagccagtaagagtaaggctaggcctacctagaagaaaattagtgatatgtatgtcagtcttaaggttttgatatttttattaaaactgaaaatacacatctccaaatggggaaaaaaattatatagtgttaatgttaagaacaaagttgattccaacctcttgagacataaacacaagcatgaggattatggacagaaacaaatccgtattccaggaacagccgttgattatcgtgagggccgtaacagatgaatacctcttcatgctttctccaacgtgaagtcgttctaatttcgtaagaatgagtttcttcattaaacgctgcttttacctagaaagaaaaactgttaaggtattttttaaagtaaggtgtaaaactccaaagctgattaagttattacataatattaatgtgagtcaggtgcagctttcaaacacccatcaataaatgtaactacgcatagggaaaatgccacttccggtttcatccacctcgacttcaccccattgatgacggagggagtcctgccctagggctctgggggtggccacaccacgacacccgacacagcacagatgagatcatcagcagtttattggtcacgtccactcacagcccagggaaggaggacatggtggtgccaataaactttatctgtaaaaagctagagagtaaatacgttcagctttgccagcactatgtggtctctgtcacaagttgttgtattttcacaatcctttcaaagtgtaaaaaccattcttagctcagggctcttgggccacacgcccacaggctgtagttcgtgctgtggtcttcctacagtaaactataaactcattggtttggcacataaatgcaccaaaagtcccaataaaaataaatcactgctgacggagtccccatgtctagcatcctatcacactacacactcctgatattatttcgtcaacatcaaccacagaaacactcacctaatcccaggctcctttgctcccgattattaaagatacttctttctacaaaagtaacaagcagacagcccttgttcctgggctaagaaagcagagcgggaacctccctaagctctgatctcacgtagagagcacgaaagcttagcacgtgggctcacaaggcatggctgctcttctccagtggaatgtcagatgaaggcgacggccaggacacagatcccagccatgtccctccacaacacaccccaaagtggttacaggtgagccaactgatggactctcttccgctctccaagccaggcctctacccctgcatgccctgcaaatacactcatttcctaaatgagccacctggggaaagcgctggggaggaggcgatctgtgaccacctcccaaatcaggtttctttcattatttcccagaaccctttccccacaaatacccatccattcaataaacatttactgaacacctactatgtgccaggccctgccatgagcactgaggtgacaaagaggaacaagacaaagaccccattctcaaagatttcagagctcagtgggaaaaagagcaagtcagtcagcgatcagagcgaagagaaatgctgtgacagctacaacaccagtttaaaagggacggggcaggaaagcaagctaagcttcagtcccggaaggaggaacgagggagaaggaaggaaggctccgcaccacaggctgctgggaaagaccggacagaggatgcagcacgaggctctgtaggcctgaagagcagagtgaagaaaaggggccaaggcaagcactgcgggagggatagtggggtctagaagaacaacaggagcctcctgacgtcaggccaacctgacagggtcacctgaagccgccgacacctctccctgtggtgccacccacatctacagccacaggttctgggcagcggaagccttcctatccaaatagaatagctgctcccttgtcagcttctcacctggacatgtgggctatgattcagcaggtccaggtacggagcgagtgcacaggtgtccggctctgcagaaaggcattcccgctgcctgggcctcaggtacacggctctggtgttgacggtgcaccaagcccacagcagggcactgtagctgaagatgctgtcaacagcctccgcaaacagaggctgcagagaagagaaaaagtctctggaggaagcaaagaactcctgcacgtgggctctctgctcttcagcctttgcttttaaagatttgggaagaaggttcaccacttccggctccaaacaaacagggcaggtatacgccttgggtaaaatctccaggtaaggcttccaaagagatcggtgcccagcatgcttttctgaaactaaaaaggtgcacagcgccagcagaggagatggaggaggcttccacctttgaaaattaaaagccagtttaaaggaattactttgattcaaaatacgaaataagccaagcagtttgttttgctgccagaaggagtgtgttcaaactgtcaacacactcagtttacttaacagactcaagagttccttccttccttccttaaggctcttcctctccaggggagcacagccccagtgctagtgctctgaaagagccatacttacatgtcagaaaaactgactcactaagccaagttccaggtttgtttgcaagagattcctctttgcaaaaaaacctctttgcttccaacttggttctccagttgtaaaccttttgacctaagtccatttgtctcacctatgtaaagatataaaatatggtggggaaaaaatggtggaaagaactgagacctgcaccatccgatatagtaatcactgggtacacagagctatttaaatttaacctttaattatttagaattgaatatttaaaattcaatcccttggtaagataagctatgttttaattgcacaatagccattcagagctagtggccaccatactggacaatgcataaaaaacatctgtcattgctaaaagctctattggagggcaccaacctaaaccaaaactgaatatgctcatatacagttgttgcagttctaaagcttttattcctaagtttacctgctctattacaaattatgtatcacagtatttttacttgcacaattgccgataaaaagatctcatgttgcctgaatgtatttagaaagttttcatcaatccttcgacatccagattcctatactgccatacattctactcaaaatttcagaatgattcagaaaatgttaacaatgacagcatcattgtctctacacaggcctaaaagacctattcactctcttccaaaaacatgccagggggaaaaaagaccagcacttacctaatggttaagagacagtatacgccaggcacagtggccgtttgcctatatcccagcactttgggaagccaaagtgggtggatcacttgaggccaggagtttgagaccagcctgaccaacatggagaaaccccatctctactaaaaatacaaaattagcagggcatggtggcgcacacctgtaatcccagctatttgggaggctgaggcatgagaactgcttgaacccggaaggtggaggttgcagggagccaagatcacgccactgcacttcagcctaggcaacacagcaagaccttgtctcaaaaaagaaagaaaaaaacggtatactctttcaacccttgtatttagaaatcccttccactgcgggtcgctctcactctgtcctcaaagatgccccaaaacaaaggcccagcagaacgtgtgccagaaaacagttcttccccatcagcctcctctcttctatacctaaataaaactaattctttcacaaaattaacagctcttcaaagttcaaggaaaactgaagtacaataacggtagaaataagagagagtaacttacatttgtcaagagctactatgatggaagagaagaggctactatgagccaaggcactcagctgtgatttacatatattatcccatttaatttttatttcttagtcagtgatggatcgggatatcatacccacactccaggaagcctattaaaaaccttagaaatgccatttacagtgaattaagaacaaactttctggccgggcacggtggctcacacctgtaatcccagcactttgggaggctgaggcgagtggatcacaaggtcaggagctcaagacgagcctggccaaaatggtgaaaccctgtctctactaaaaatacaaaaaaaaaaaaaaaaaaaaaattagctgggcgtggtggcaggcacctgtaatcccagctacttgggaggctgaggcacgagaatcacttgaacctgggaggcagtggttgcaataagccaagatcacgacattgcactccagcctggcaacaggtgagactccatctcaagcaagagagagagaaagagagagagagagacaaggaaggaaggaaggaagagagggagggagggagggaaggagggaaggagggagggagggagggaggaaggcaggcaggcaggcaggcaggaaggcagggagggagggcaaactttctagaatggagtaaacttttcacatcattcaggttatttatcagctctacaagggactgggttctaatgaattgtgtctcaagtgacatatttgccattgacagaccttaaggagaagcacttgcaccaggtaagcaagtgtgtggtcacttacttagtaatgtatgcccctaagtagcttcgaatcactgtgtccgtggtgagcaggcaactctcaggcaacgaaataatcatctgtccctcctggccaaaaggaaagtaaagttgaggacgcctatgctttgggaaggacccatgagtatgagtcttacaaagtcgttgatcccacaatcacctaccagtaacccactgtaactcaaccaaaagccaccaatgagcctaccaatggagtcgctcccaactctgcgagtcagcagatgcacacgaggctgctccaaggcgaggccccacagccccaacaaaaatgaaaggtcaattatgtgactgacacccacaagcagtcaacccttcaccagaatgagtggtggaaacatgctgacaattcaaattatactgtttcttcactttttttttttttttttgagatggagttttgctcttgtctcccaggctagagtgcaatggcgtgatctcagctcactgcaacctccacctcccaggttcaagcgattctcctgcctcagcctcccaagcagctgggattacaggcacccatcaccatgatggtgcctaatttttgtatttttagtagagacagggtttcacctatttcttcactttcttatgccaggaaatagtgctaccaatagtaaacagacagaaactacccccaaaaaattgtatccagtgaaatccaagtggccaggtgatggtctgctctctacataacccacgcttatgagctaaagaaaggccagcatgcccaacacagtaagcgtcgaactctaccacttgcaagagtatcgttttcagtgtctcccacggagatagaaccatggaaagaaaaattagatgtaaagtaatagaaaacagtttaaataaacactgcatgaagaagccagatgtaagactctcctttaattctaactggcatctaagttggttaaaaatctcagccaaggccaggcgcggtggctcatgcctgtcatcccagcactttgggaggctgaggcaggtggatcgcttgaggtcaggagttcaagaccagcctgaccaacatgatgaaaccacatctctactaaaaatacaaaaattagctggccatggtggtgcacacctgtcatcccagctactcgggaggctgaggcaggagaatcacttgaactcgagaggcagaggtggcagtgagccgagattgcgccactgtactctagcctgggcgacagaacgtgactccgtctcaaaaaagaaaaaaaaaatctcagccaaaaaatcttccgggatcaatttctggtttcctcatctgtaaagcaagattaagctggatgatcactatggtcacttcccattccaacatcctatgatcttttggtttgaaaatatttgggtaaatctctttatcatcaaaatgcaaactgtacacttcactgtgcatttcactatatgtaaaatatgtctcaattttcaaaaacttttgataaaacaaccatatttgaatgtacatgtgaaacaactgccaattatttcatgacctaaacaaaaactacctgtagttactgctgcatacatgacatttctcatccccaaattctgctacagaataaagtcaattacaccttcctccaaaaacaaaaatattgtacaacaatatgaatgtacttaatactactgaacttcaaaatggttaagatggtaagttttatgttagatgagcttccgggtttatggattcgtgggctgcttccacctgctaggagggtggtgcactctaactcggggacagaagcccctgtgctcaggactcttgcagacctctatatctggctgttcatcttccataatcaactggtagatgttacatccaagaggaaacaatccaggcaaggaagcacaagctgatcaagatctgtagttacgtggctgccaagttgtggtttttgatagattgtcccatcagggaagactatcctcaaacagagattttacgagcattaaaggccaaatgttgtgaggaggaactggactttagggctgtggtgatggatgaggtggtgctgacaatggagaaaggaaacttgggtctgcggatcaatggagagctaatcactgcctacccacaagtggtggtagtcagagtaccaaccccttgggtgcaaagtgatagtgacatcactgttttgcgccatctagagaagatgggatgccagttaatgaaccgacttcaagccatcctgaactgcgttaataagttctggacatttcaagagttggctggccatggtgttcctctgccggatactttctcttatggtggccatgaaaattttgctaaaatgattgatgaagctcaagtaccggagttcccaatggtagtaaagaatacgcggggtcatagaggtaaagctgttttcttggctcgagataagcaccatttggctgatctaagccatcttatttgccatgaagcgccatacttgttccagaagtatgttaaagagtcacatggacgggatgtacgtgtcattgtcgtgggaggccatgtggttggcaccatgttacattgttcaacagatgggagaatgcaaagcaactgctcattaggtggtgtggggatgatgtgttcattgagtgaacaagggaagcagctagctatccaggtgtctaatatcctggggatggatgtgtgtggcgttgacctgttgatgaaagatggcagctccttctgtgtctgtgaggccaatgcaaatgtaggtttcatcgtctttcataaggcttgtaatctagatgtagctggtatcagagcagactatactgcctcccttctaccctctggccagctcacccagcgtatgtccctgctctctgtggtgtccactgccagtgagactagtgagctggagctgggtcccccagccagcactgctgttgacaacataagtgcaagttccagctctgttgacagtgaccctgaaagcatggagcgagagctgctcaccaaactcccagggtgactgttcaacatgaaccagctgctagccaatgaaatcaaactactggtggactgactccactggtaattaaccaacaaaacccttgtaaaactttctttcttttttcttttctatttttaaaaccaacttgcaatgctgttcatggaggatgctcaggaagatgagagaaaattagtaggattagttggagagagtgggagatagacgagacccccgctagtaagatgttactttcatttacaaatcctacagagaggcagaataggtggggtatagaaaaatgtcaggctgtcagttacccttttaaattgctaaaaaatttgtatgctcatagaccatgaggaacaaatactttttttttcatggtcccttgcttttgtttttgtacaaaaaaaatggttttgctacaaatatccaagtagcataacttcacattgtgttggaagatttgtcatcagtgaggaaaacatctgcttaaattacaggaatttttgtattatacagctctgaaaattctgccatttccttattaactagcagctttagtttgtagtttatgaaatcttgaggggctcttttactgggatttcttatttttgtttttcgttttttccctcttaatttggtgggagggtcaaagtgaatataacccaataaaggcttcttaatgacaaaaaaaaaagttttatgttacatatattttacaattaaaaatttttaaatgatgaaaacattaacacggcgtaatagaattacaacattaaaacataccattctttatatattggacttcttgtgtttgtgattttcacctgtttaggaaagataacctgaattcccttgctgactatgcttgcattttaaagaaactatactttcctttaatattttaaaaacttctctttttaacacaacatttttaaaaagtaaaattacttttgggccaggcatagtgcctcatgcttgtaatcccaacactttgggaggccaaggcgggcagatcacctgaggtcagaagttcaagaccagcctagccaagatggtgaaaccctgtctctactaaaaaaaaaaaaaaaaaaaaaaattagctgggcatggtggcacatgcctgtaatttcagctacttcaggaggctgaggcaaaagaattgcttgaacccaggagacggaggttgcaaggagccgagatcgcgccactgcactccagcctgggcaacagagcaagactctgtctcaaaaaaaaaaaaaaaaaaggacgttttatctactgaaaaaaaaaagataccattccttagcctaaacatatgtacacatctgagtgcaagttttaaatagagaatttaaaataagataatttttaaataaaggaagaaattaatttctggcttcacagaaaatcgtgcgctagagatctttaaaatagcattggaagaatgaaaagaaaccttggaggctgtcatttacttcctcattttgtaggtgaggaaacaggagccaagagtatgaggggtctcatgctggggcctcaggcagctgaaggcaactctggcccaagtctgaggcctcatcctcccctagctctggtttctacctgccacatcacgactgcctcacagacagcagcagctcccttggcatactgaaaacgtgatctgacatgtaacatgtgctgtggcagagattgctagttgcctatcccaacacgccttctctccccctcctcgctaacggaatcctacttagagggcacgtggctggggaaaggccagcacggatctcctcccttgcagctggctagggctgtgtacctgatcactggccaaggacagagggactggaatttccttaaaggaaggaagcctgcccttcctcacccgcttgctctctcctgatgcccaagttccaagacccacaacctgacctgagggtgcagttcccttaaggacatgagagagctggaaggagttggggcctctgccagccatgggactgccccaccagccagggtcagcctactccaagcttgtttctatgagtgagaacaaaataaatttccatgctgcttaagcacctcaattttgggcttgtcttttattgcaacaaacttaatcctagttgatagaaccatattcaaatatatctattaggtaagtaagaaatgactgtatgtctgaaatttttttaattcacttcgtttgaaccgcaaaaacaaagcagcaaaatctacattgggtttcaaggatcaaagaacagttctcacctgcagggatgtttgactcatcagccctcttcctgtacctaggaaagcaaagacagaaagagagtaaatcctaccataacttcaaggtcccagagataactattatggaaaaaaaaaatgtgaacttcaaaattacacaaggctgaagctggatgtctctcagcctttgattcccaggggaaacagggagtcagaaagctattccagaaaatgtcttgacctccagtgagttataatccttgaagggcagtcagcttcagaggtgagacctaaagagcaccgtggactttatacagacctactgctgggcctcctgcaggacgctttgggctggactctctccactggggcctaccagctaacaaggtgctattcccaatgcccagccaacctctgaggctagagccccaggccacttatccccattaccagactcagctctcccaagtgaagaccttgagacccctttgattggccgactggccaataaaccccactcaagtccccacaaagcctgcagacatcctcccctctctgatcaggtaacccatgagatgggctctccatgacctggtgagctcagctgggtaggtcagctccagctgttccctgtgagccaaggctccggctggagcacagtcaccatagtaacctcagcagctgcattaataccaattaattcaataaattcctttatttaaaaattaataccaacttccagaagtttctcccttcatgcctaagcttctgctcctggaacagtcagacaaacattgaaaggatgctcagatgacagcttttctggcaggcataggtattacatggtcataagaggcctagagcattaacgtctccaattcatcgttcttcacctttcctctcttagctgggagggaaaataattcagccaagtcagtgcaggactactgggagctcccagctcacggtggctcactgcctcaagtcctccatcagtttcccgcaacttggatttgatgctcccggctcatggtgggaattcctgcctcaagtcctccatcggtttcctggcaggttggatttgatgctcctggctcatggtgggaattcctgcctcaagtcctccatcggtttcctggcaggttggatttgatgctcccggctcatggtgggaattcctgcctcaagtcttccatcagcttcctggcaggttggatttgatgctcctggctcatggtgggaattcctgcctcaagtcttccatcagcttcctggcaggttggatttgatgctcctggctcatggtgggaattcctgcctcaagtcttccatcagcttcctggcaggttggatttgatgctcctggctcatggtgggaattcctgcctcaagtcctccatcagtttcccagcaagttggatttgatgagtcccaattcatctcccctcccaggaggacactgtctgcttatacagctggttctagtgttaacttatttcattgattttgtgtaccccattgtggagttaatcatccctgtgctccagaactcctcctagaatcaatgactaatgggaagattttcttctacctggttatccttccaaaaacttacgtgctaatctaagtggaaattctctccaaacatatatatgaacaaaagctggcctatggaatacatctagaagatcctttacctatatttatatggtagatagtgtttaatatcaaaaaacatatagtaatctacacttactttcattttcatattggatatactaggcaaagtagaagtggccattaggagctcatgagagtaaagcttatcacaaatgtctcaaagcctcaaaatttccactatcatcaatctacatgggaggccctgacctggctagtgcttttggtggtgaaaggaaatgctgcggtcagttcccaaggcagaaaagaagagagagtctaaagatggaatcctgcttaggagatttcctgtgcccctccacaaactaagatgaattccccagagttcatacattttgactgaagcccagaaatgttacctcctatcatacactgattaagagctaaaaactacatgaagcacttacagaaggttccccagaactgtaagcactgggcacgggtcactgccaagccacctgcatcacccgaaatctggggctggggccagggcaagttgtgctcacttttaaaaataggaactctttactgctccaaattacaaacagatgacctattctcaggtattccatctaaaccatctgctgattcctgcttgatgattttaaacccatccttcctagggcaaatgacaccagagatgtgggcaggccttagacacggcaagtttactgctgacactactgactctcttgatcatctggggaaaaactctgttctgtacatctaagggtgtggcttttactgaccatctttgacacacaaaaacagaaagtcaagcattattttagaggctgacaatatggttcatgaccatcaactagaaggggccttaatagaaaatggctcaaatcaagcattttagttcaaagtcatgatgtgtaactgactcatggagaacaactttacacacatcacctcactcagcaaggggcacaagtgggaaatcatttgccttggcgtgtggtatatgaggaagttaatttgctcaaagttcaattacctaatgggtacttgaataataattctaatggccaaggggagcattgtgtggcatatgctttgacttttctgtaagatgcagcctgccctgtgatgtagaattttggggccctaattgcaccaccactatctctgtgctacagcagactccaaatccttttaaagagcatcttggtcctccctgtggttatctcttgcccacctgtgggaagagtggagtggccatgtatgcaggcacacacccatagcaagctgcccaacttctgtgagagaatgttccagaagaaagtggtttttgttttttgttagttttttgagacaaggtctcactctatcgcccaagctggagtgcaggggcatgatcatggctctctgcagcctcagcctcccgggctcaagcaatcctcctgcctaagcctctagagtagctgggactacagggcacaccaccgcgcctggctaacttttgtacttttagtagagacaggatgttgtcatgttggccaggctggtctcaaactcatgagctcaagtgatctgcctgcctcagcctcccaaagtgctgggattacagatgtgagccaccacgcctggcaaaatgttaacctaacctccctaataagcacaagttccagagaagaatgtcagtctacctcagttcagtgctgaagcccactgctctgcaattaactggccatacacaggggactcctcctccaacccaaggggaacacatgcaaaccagctgaaggacaatatctgctgaggcccacctgcaagagtggcccctgctgtctacctggctctcgtgtgggaaagggcaggacagctgaaggctagatcttacctggaaaacaagcaggcgctaagtttgaatcttgaaacttcctagctttcagccacttcctcagctctataaattcagacttgtggctctcattcactatcaggcaaggagagaacaaatggtgattaaaaccactatataatcggattaccatttttaaaagaacatgtctgatgaaatgtgtcagacagacttacacaatagtaagaattggtgtatctaaacatagaaaagttacaataaaaacacagtattggccaggcgcaatgactcacttctgtattcccagcatttgggaggccaaggcgggaggactgcttgaggccaggagtttgagcccagcctgcccaacacagaaagaccccatctcttaaaaaaaaaaaaaatacaatattataatctgaggaccaccactgtacatgtgatccatcaaccaaaacatacttatgcaacatacgactatattcattcaatgtaatcctaatcaaaattcaagcaggctttcatacaggaattaacaagatgatcccaaaattcatgtggaaatgtaaaaagcctagaatagccccaatatctttgaaagattgattttaaaacttattataaagctacagtaatcaaattagtgtgatattgtcaaaacagacacaaataggtcaaaggaacaacacagaaaataggaagaggtccacacgtaaatttttgacaaagtgcaaaggcaaatcagtggaagaagatagtcttttcaataaatgatgatcaaacaactggacctccatcagcaaaaaaaaaagtgagcttatcgatatcttgtaccatatccagttggatttacataggactttccagatggccaagcacttttgtattgaacaagatacagtatcttcttcagacagggttaccctgaatttgaagtcataaatttacatccaaacattgatatcctacagatagctgaaggtcaagaccagaaaaagaaagttgggagtcatccccagagaagacagttgaaacaatgagttagttatcttcacattcccaccaggatctaaaagaatacaatggcaccattaaaaaagagtgttatttaagaaatattctctttgggctgggcacagtggctcacacctgtaatcccagtgctttggggaggccaaggcaggaggaccactcgagcccaggagttcaagaccagcctgtgcaacatagaccctgtcactacaacaaatttaaaaaaacattagccgggtgcagtggcatgtacctgtagtcccaggtacttgggaggctgaggcaggagggaggctaagggaggagatcacttgagcctgggagatcaagccatgatcacgccactgcattccaatctgggtaacagaatgtaccttgtctccaaaaaaaaaaaaaaaagaaagattctctttgaacactgtgtgcctttgagaaaagctatgtgttaggccgagcatgctggctcacgcctgtagtcccagctacttgggaggctgaggcaggagaatcgcttgaaccggggaagcagaggttgcagtgagccaagatgacaccactgcactccagcctgggtgacagagcgagaatccgtctcagaaaaaagaaagaaagaaagaaaagctacgtatgaacaaacaagcaatcacaaaaggatttcttttttcattactggtactaaaagaaaaaccatacctcctcttgattcagaacttccgcagagttttcgtcttctgatccggcttgttctcccttttcctttctgcatgctaaaactgtagtttcttttttctgaaatacagttctattttttcaaaaaggacaaaactgtaatttctgtggaaatgctcaatctaaaataaaaaacatttctttgatttactttccagttatatgataatcactgttctttgtacctttaagtatacaaatgtatgttttggtaaactgtttctctcaagtgcttttgtacatgaaacgtttatactgtgagctaaatcatgatccctacagtaacagaattcccattatatcagtccctctaaaacagttttatcttgcagacctagtgactacagcttaatctactaaaaatacaaaaaatagctaggcgtggtggcacacgcctgtaatcccagctacttgggaggctgaggcaggagaatcgcttgaacctgggaggcggaggttgcagtgagccgagatcgcgctactgcactccagcctgggcgacagagcgaggctccgtctcaaaaaaataaaaaaataaatacataaataaaaataaaataatggctgggtacagtggctcacgcctgtaaaaccagcactttgggagcccgaggcgggctgaggtcaggagttcaagaccagcctggccaacatggtgaaaccccgtctctactaaaaatacaaaaatcagccgggcgtggtggcaggcacctgtaataccagctactggggaggctgaggcaggagaatcgcttgatctcaggaggcggaagctgcagctagacgagatcacgccactgcactccaacctgggcgacagagcgagactctgtcacaaaaaataaattaaaaaaataaaaataaaaaataaatctacttctaaaacatacgagggcagaaatgagcaagagacaagaactccaggcaatattaataccgcacttccgcagtataaggttcattatttgacctaacgaaagtcggcatgtccagctccagaggcgaacggcggctggttcggtgcgggtcccagcgctcagtccacagaccgcgccgggaagtgtccccaagactcccgggccctcgcgcgagctgtccaccatcaccctgctgaggaccacgtgaagcccggtgaccgccacagacacaggcaccgtccccgcccccatagtcctcaaactctagccgtgaggccgtcctacggtccgacacacaccgctcccgcagccataggccagccaggcgagcatcggacctcgggcctcaggctcctcagctttacgcagcgcgccggagcaacatgcgctaagtgtaggactccacaagatgagaggttactgcagcgcacacgataatgcctgccctggaggggacctgcgacctaaactcagttctttttacgctgatgaatgaaagactaaggaacgcaccccgccgactctgctcccgttacccgggcaactggaggcccgacccggaagtcctactagctcacctaggcgccggcggccgcttccaagatggaggctgcagtgggcgggcccaaggcacgtggaaataccaaacagccccagatgaaggcaagttaaaggaaccggccaaaactgcagagggagaggctgaaggctgtcgcgcctgcctggtgtccttaagcaatccaagtcctcagtctcccgggtccgccccttccgccgcgggcggcagcttccggctcgcgcatgcgcagtgttcgcggactcgccgccaacgcccagtacagtcggggacgaggtcggcacacccacagccccataacccctacgtcgagtcaggggtcagaaaacccagtaacccgcaggcgagcaagctgcgcactgaaaagccggcctgcggagtctttccttacgaagttaaaccacctagggcgcgcggccctgttcgcccagacctcgggctttcctgccaggctgggtttgccgggtcgagtcactttgctcgccaatccccgcccccattccaccgtttcattctggccccaggacccgcctcacaggaaaattctaaataatatatctaaataccccttcttccaatagcgggagctcgatttctgccccacccacccccactttgattatgggctatgcctagtaacttgattccaaagagtacagcctggaatggtgttggggactacagtggagaaacctggcaaacagtaccttaccgggtggtcaaggataacatcaggaagaaatcatgctgatagcatgttcctgtggtgtctctctccaaaacccttctatggaaatcttctatgggggaaaaaaaattagtactcctaaacatgttttctgtcatgaaaaacaagtacagttgtcccttagtgtccgtgggggaatggttccaggaccctgcggataccagaattagaatgctcaagtcccttgtatacaatggtgtaaacctaagtaacaaaagaggctccctaaaagaaaatgagatttatctgggagtagcattgcaatgggaatatgcatgccatagtaaactgtgtgcgttttgggggaggttgaggcaaggagatgtttttaaaaggaaaatgaagattatatgaattgctttaaatcaattatctttggctaaaagaatgaataacaaaggtagcatcagtccaaagttgctggacagatgtccttgcagaaggattttctgtgtttaagattgggcctttctgcaaggttagggtcttttgtgacaattcttgttatgaggcgtagtgcatgagaacccttccttcaaggccttccccagctgcatttatcagggttttgacacaagtgactccattttgattctgcaactttcacaatggtgtaatatttgcatataacctatgcacatcctcccatatactttaaatcatctctagattacttataacatctaatacaatgtaaatactatgtaaatagtgaaggggtggcctgccgctccacacctgtgggtgtttctcatcgggtgggatgagagactgagaaaaaaaagagacacagaggcaaagtatagagaaagaaaagtgggcccagtggaccggcgctcagcatacggagcacaaatcctatttaaactacagattctaaacacaaatgattttattcacccctgccccccaacactaaaagatttaaacactaacatagtttctaacagctgtaaactaaacaaatcctaagcccctactgactgaatggaaccccttttggccaagatggccccagaaaaaaacttagaaacttagttcccagccctgatggaatgtgaggtcagacatgcctcattataccctctctcttttacagtttagatacaactggccagcattgatgttaaaatagagaccatgagactgatggaacagactttttgtggcaataagatacaaaaattataaacaagacctaaggccattccaggaaagagttaagtcacttcaagaataaattctgttctaatggttacaagttttttctttttctctagcagctaaacaagcactcacctccacctaagcaatattaaaacaattaccgcttgtgcaccaccagatgttaactaaccccctgttccacaatgacagagcatcaccatcttggacaaccccctcattctaaagtgcaccttaataaaaaaccgcctaggccaggtgcggtggctcacgcctgtaatcccagcactttgggaggccgaggtgggcagatcacgaggtcaggagatcgagaccatcctggctaattcggtgaaaccccatctctactaaaaatacaaaaaattacccgggcatggtggtaagcgcctgtagtcccagctacttgagaggctgaggcaggagaatggcatgaacccaggaggaggagcttgcagtgagctgaggtagcgctactgcactccatcctgggcgacagagcaagactctggctaaaacaaaacaaaacaaaacaaaaaccgcctaaatccaaagggcatcagcctaatggctaaggtcaccatgaccataaatcacaaataatatcttcaaccagaaacattctaaattcccccctgaccagagacatggtagccccaagataaaccccgttccatctgggaagtggggaagatgatagccccgagataacacccctcagggctggaaagatgtccaccccaaaataacctcccctcttcccagagagattccaaccctgccatgaacttctccacacacataaacattccaagcttgtggtaagccccctcaccctaaaaccaatacatactcttagtctctaagagaaagagttcctgacggaaacaggccaggagcacctgtcaggtttcatataaggtaaacctgtctctaactgccagccgcgtttagtgttcttacgtctttcttgaactcttatatttggtgcggaaacccaggccgggtgctgggggcagaggctctcttgcaacccaggaagcagtgggcaaccacagctggtcctgagctaatttctggatcctgagggtctcgggccacccgctccatcttttctctcacttcacttttccctcatcctctcttttccctctctctctttccttctctctctctctttctttctctctcttcctcatgcggctgcagtccaagaggccctttgccaattccaactggaacatccaacatcggacactaatccagccaactggtaagatctgccctcccctggctttctcgcggtacccgggaaaagtcaggttggccgtccggtcctcagaggaccagcagaactaagctagaggaaaccttggggacgcccagtttcttctcaacttgaccatcctctttagtaagaggattctgggtctctgtcttttgtctgggaatgcctagaacaaaaacagacaccctctgcttcttctcgccagtccacatggatgccaaacaatcccacatccctacacacaccacaaataacatctccaaccggaaagattccaaactcctccccgaccagagacatgctagcccctagataaagccccctccaggccaggaagatgctggccccaagataacccccctccaggccagaaagatgtctgccccaagataacctccgctcctcccagagagattccaaccctgccatgaccttctccacacacataaatattccaagcttgtgataagcccccttaccctaaaaccaatacatactcttagtctgtaagagaaagagctcctgaccaaaatgggccaggagcgcctctcaggtttcatctaaagtagacctgtctctaactgccaacgcatttttgcttctttcctctttctctaactcttacacacaagccataactacagctttgattagacaagagactgatttcaacaactttctcctgataagaagatcatggactatggaatggactggttctggtttacagaggctgtgtacttgcgtgccttgatgtcctgaaagaccttttgacagatagggcctaatggtaatacatttaaatgtcaagtcaccatcccaaagtgaatatacatgagtcgtatgttacatgcatgtttcttcaatatgcatgtatcaggaccaccttcatgaatattcacagctcctcctgtaaactgttgaatgtgtaagtttagccaacctgttcagtctaaagctcctgcctcaaagcctcccccttcaaagtgcccgtctctgtttctgctggagtcagctccccagcctccaggatggctaccttgcaggttgtacccgtttagaagaaataaagtccccatctccttttcttttttttttttttcagagacggaatcttgctctgtcccccaggctggagtgcagtggtgcgatctcggctcactgcaagctccgcctcccgagttcacgccattctcctgcctcagcctcccgagtagctgggactacaggcgcccactaccacgcccggctaattttttgtatttttagtagagacggggtttcaccgtggtctcgatctcctgacctcgtgatccgcctgcctcggcctcccaaagtgccgggattacaagcgtgagccaccgcgtccggcctccttttctaaatttatacattgtgagttgtttttggttttttctttttttttttttttaacacagctcaaggctgcatggctaggatgaccctatcacccctaggatgactctagccccttcctgagaatgtttaagctgccaaaaaaaagaaaaaatgtgtttgtaataaccaacttctgacaataggcccctgactgccctttcttaaagcatttactaaaaacggcttagagctgtgaattctctcggtccctttgagatgtatctcccacccaggagtgtttcttggccaggtgtggtggctcacgcctgtaatcccagcactttgggaggtgaaggcaggcggatcacctgaggtcaggagttcgagaccagcctggccaacatggcgaaaccctttgtcgactaaaaatacaaaaagttagctgtgcgtggtagcacacgcttgtagtcccagctactcgagaggctgaggcaggagaatctcttgaaactgggaggcagagattgcagtgagccgagatcgcaccactgtactccagcctgagagataagagagaaactccgtgtcaaaaaaaaaaaaaaaagaaagaatgtctttctcaaggacctgaaagccattcctctgaaatgtaatcatcagaaatgatacggcctctgtctttcagtctttatagtgggagaatagaatcccaactttgctaattgccagctaacagacacagctggcctaaccaacatttccactgagcaacccttggcaatttgtcatttccctaactcctcccacttcctgatccttcactctccctttaaaaggcacagtcatctctgtacaaatgaaagtttgtttccactggaccctctttcctattacaggagttcattattgactaaaatctgtccttaccaccttagtgtctggctttatctttcacagaattcagtaaattgcttgagttaaataactactaagcacctaagccacagattgattccaggtctcaaagtccatggtctaccgctgtagaaaggcttattgaatatcctaaacaagcataaaatgcaagaggaacacagccagtgtcaagcagatccgtgagggtaactaatcaaaggaacgacctggagaacctcacagttcataatttaacaatattattttccaacatcttttcttttaatatataccatggaactgtgttttgggcttttttgtttttgtttttgtttttagattcgggggtacatgtgcaggtttgttacatcagtgtattgcctgatgctgaggtttgggcatctaatgctcccaagtagaaaacatagtacccaatagttcgtttttcaacccttaccccctccctcccccttttggaatccccggtgttattgttaccatcttttgtgtccctgtgtactcaaatgtttagctcccacttataagggagaacatgcgttatttggttttctgtttctgcgtttgcacaatagcctccagctgcatccatgttgctgcaaaggaaatgattccattcttttttgtgggaactatgttctttagttgctttaaactagtgggtagtagtgctcgtttgggcagcacatatactaaaaccggaatgatacagacaagatttagcatggtgcctgggcaaggatgacatgcaaattcatgaagcgttccattaaaaaaaaaacagtgggtagtaaagatatgaattcattccacaggttaattgatgtgataaaattctttatctatatagcatccaatatagtctcagacctttgattctcacaactaaggcatgtcttccaatttagccaatagcagtaatagcagagatctggaaactccatctttaaatttctgttttatttcttaaattgttcagaatccagacaaggtgctacatattggaggctcttcacacataccaccagaatcaagacccagatgtaagagagacaacaatacaaaaccatccaagtagagcttaattcacaggctttaaattatgcttttcaaaaacaaattttcaaaaagtttcccatagtcaaacccatcagacatttatgattcttcccctatttttatgcttataaaagaaagcattttcccctactgaaaataaaacttttacttttgttttcttttagttgttttatggattcatttataaatcactgtttctctctcttcggaaattatttagtgtatgttgtaagggatcttttttctttccaatcattatgccctttccccagtgctaattttggaataattctttccctcactagttgttaaaccacctttatcatacagtaaattcttgttaatatatattttatatattttccggagcatcctgcctaatgtacctgtcaattcttatgttggttccagtcctaaaaaaataaatcagactcaaactcatgattcatagtcctcataggatttgccttttgaaacagcaggaccctcaccctgtccaaagttccctgtacaccatgtgctattgctgactggccctcttaataaatttaatccatccactctaacactaactcacaccagctacagaagacagtagctagtgcagtggagagaacccagccaatgacagacccaacacgcacacactgggataggaaagaaaatccaaaacagagctctgaattatcctgagtggaaaaaaaaaaaccaaaaacaaaatactacaaactgtatgactccatctatgtaacatttttgaaacaacaaacttgtagaaatggtgaacagattagtggttgccatgaattagagttggtttggggagtaacagagaggtatgtttggtgataaaagtgcaacaggagggctctttgtgctaatagaaacattttcatttaactatagtggtggatacacaaaccaacatttgataaaattatataggactaaatacatacacaaagtacacatcaaactggggaaatctgagtatgattggtggactgttttgttgtcaatatcttcactgtgatgttgtactatacttttgcaatatgttactattgagtgaaactgagtaaagggtaaggaatctctgtattatttcttacaactgcatgtgactctataattagctcgacaaaaatttcagttgaaaaaaagcaagggtctttccttgattattaacttgttttaaagcaactgattggaaacctaccttgaaattgcaatgtaattgcaatctatttaaagcagtggtgttcaacagacctttctgcaaggatggaaatatcctaaatctgtactgcccaatacagtgaccactaacacatgcacatattgagcactggagatgtggctagtgcaactaaaaaactgaattacaaattttgcttaatttgaatttatgtttaaatggccacctgtgatagtggcaacctatgggacagcacagaaatgaaacttgaccttattcccaattcccttgtaagtaggaaggaggaacactcactttgaaaccatgcaattgtcccataggacagatgtttatggtctctttttttttccttttttttttttttgagagggagtcactctgttgcccaggctggagtgcagtggcatgatctcggctcgctgcaacctccgcctctggggttcaagcaagcaattctctgcttcagcctcccaagtagctgggattacaggcgcctgccaccacacccagctaatttttgtattttttttttttttttttttttttagtagagatggggtttcaccatcttggccaggctggtcttgaactcctgacctcatgatccacccacctcagcctcccaaagtgctgagattacaggcgtgagccaccgcgccaggcctggtctcttttgaataaacaaattgaccctcccagtctaaaaacttgagaaatttacatttgtcttatctgagttcctttctcagggaactagccatcagtcctcccagatagcaccaaggaactgaaacttatcggatcaccacatctggaaaatcagacaccagacccctcacctgcaacaattgcctgatgcctgttgacccactcctcttcatctctccctaactcctgctattttcccacatgcagttacatttcttccctgctatatcctaattttaatcagttgagaagatggatttgagactgatctctcccccctaggctgtagcacccaaataatgccttcttccctgacaataatggggtctcagtgactggctttctgtgctgtgaaccaccagacctagaccaaactcctggcatttctctaacaatttcccaccactgaactaagttataaattctgaggatggatccctgtttcttcattttaagatggggattaaaaggtacatcctagagtgttattgtccgtgtaaaatagggctgtgaaaccccctacacctatgcacagataaactgatggccctgcaaatgcccagagaagtaaccttataaagatttagtgaatgtttcccaccattattggaaaatctggctaagtcagtagctttgttttcatatacttagggggaaaatcaacaaaaacttgatgccctgttatttccttccagtttcttctgcaactctagctccaaagactgcagttcctgcagtatttttttttttagaacaccaggaaaaaaagaaaaaaaaaccatgcaaatgtactatttcttcaaacacaactaggaatgattgaacagctgggagaatatgaagaaaacccctcagagaaccaagggcaagcagtgagttcagatctaggcacatggccactaggaatggttcttcactgccacgtgggcagccaacagccagtagctagagaccagcctcggtcttcggcctgcgggttctgcaaagtcaggctagctggctctccgcctgctccgcaccccggcgaggttccggtggggaggggtagggatggttcagccccgccccgctagggcggggcctgcgcctgcgcgctcagcggccgggcgtgtaacccacgggtgcgcgcccacgaccgccagactcgagcagtctctggaacacgctgcggggctcccgggcctgagccaggtctgttctccacgcaggtgttccgcgcgccccgttcagccatgtcgtccggcatccatgtagcgctggtgactggaggcaacaagggcatcggcttggccatcgtgcgcgacctgtgccggctgttctcgggggacgtggtgctcacggcgcgggacgtgacgcggggccaggcggccgtacagcagctgcaggcggagggcctgagcccgcgcttccaccagctggacatcgacgatctgcagagcatccgcgccctgcgcgacttcctgcgcaaggagtacgggggcctggacgtgctggtcaacaacgcgggcatcgccttcaagggtatggggaggggacgtggcctccccgaagaagaaccgatgcactggggctcctggcgtctgcggggtccataacgcctccctagggaggagagggaggagctaggagatgcagggagtgcagaaaccttggagaaagtgagagttttccagccaaagggaactttgtgtttccctggctgggactcttggggatctttttcaggttttctgcagtttttctgaattgagctttaaggcaactggatggattttgaactgattttaaaataaacgacaaattgcaaaaagaaaaaatggttatgccaagatccagtgtgtgcacccttcatcctccttcccccaatggtgccatcttacaaaaatactagaacatgatcaaaccaggagattgacattggcacaatactgtaaccagatacagacttactttaggcagagggcactaagtttttttttttttttttttttttttttagtatcattgtatagaattttaccccatgggtacaatgtattaactatgttctctttctctcctaaaagttgctgatcccacaccctttcatattcaagctgaagtgacgatgaaaacaaatttctttggtacccgagatgtgtgcacagaattactccctctaataaaaccccaaggtgagtctgatgggaaacagcgcaccttctctttggggcttgatttggcccctgcttgcctgggatttctcctgcaggctcctgcttcctctccatgctgcacgtgcactgacctctgtgctttttctcctgccagctgatatgtgccattttgcctcaggactttgtcctcacttctcccactcccatggccattcgtcctccctgtcgcactggtctttgcacacctggctgactctcatccttcaggtcttagctcaaacgtctcctgagagatgctctttatttgctccattcccctctgcgtgggagtccatcctgtaccctttctctgctctttcagagagatcttattcaggctggtggaggctttactaccaccagttcattaggcccttctaatacctgtcacctgtctgaaacactccttaagctcccaaccacatggttgtcttgctgcctttccatctcttcctgatgcctttccccacaatctaagatatttccagaggatccctatccttttccctaagtcgtttgggacacagaccccaccacccacccaccaggatcctgcaggtcaccatgccccacccctcataatcatttactaggtcctaggagttgtgcccactgagttcctcctgaatccgtctcattgcagctctacagcaggccctcacctgtccctctggacaattgcaaaccctcacaaggcacctctggtcttgagtcttttcctcttttcctttcccagcatcctgcgtactgtctgcatggtcatgcctctcccaaaatccttcaggaggaaagtccaagcccttagcatggttcacagagatgtccataatctgccgctgcttaactctgggcccattttaactccccttcaacgtgctgaaggtgctggacatgactatcacatgtctttggttgtaaactgctgtgatagttaccctaagtaatgggacaggagatgaacccacccattaaataacacagcaattaagcagccacttttagaaaaatttaaatgtgtggcttcgagttgggtacttgcatgtacagcttactctcagcttttatcctgtttccctgtcctgtcgtcctgttaagttgtgctacttctaaggctctggttcaccaggacctcaaagggcagctcttccaaatctcacctgactctactcagccaaaattcgaaggcaggaatgaacttcttcatgcaactaccaccacactttctatgcgtattcctcttagaactcataccagtaactgtctctcatatgaaaattttctgctccaaaatccctgcaaatttggcattcacctctctacgggattgttgcacacctttctacataatgctttgtggtgtatcttagggagagtggtgaacgtatctagcatcatgagcgtcagagcccttaaaagctgcagcccagagctgcagcagaagttccgcagtgagaccatcactgaggaggagctggtggggctcatgaacaagtttgtggaggatacaaagaagggagtgcaccagaaggagggctggcccagcagcgcatacggggtgacgaagattggcgtcaccgttctgtccaggatccacgccaggaaactgagtgagcagaggaaaggggacaagatcctcctgaatgcctgctgcccagggtgggtgagaactgacatggcgggacccaaggccaccaagagcccagaagaaggtgcagagacccctgtgtacttggcccttttgcccccagatgctgagggtccccatggacaatttgtttcagagaagagagttgaacagtggtgagctgggctcacagctccatccatgggccccattttgtaccttgtcctgagttggtccaaagggcatttacaatgtcataaatatccttatataagaaaaaaaatgatctcttatcaattagcactcactaatgtactactaattgagcaacctacgcactcagttgactacgtaaatctgtcaggtcttttgtgatttcctctgatgcaggagaggaaaaattgtaattgatgaaaataatgaatgaaaatcaacagatgaataaatggttctttataagtgtccatttgtacagattgtttagatgctaaataagctttgtctcaagtacaatcaacctaaaaggtcaagggaagggacagtacaacttgggggtgagcaaacccagaaagtaaagaaagagccagttagtcaatattttcaatgttgtaggtcaaacaatgcattggaactccccaaatccacattatgtaacaaaagctgacagcatgtaagcctgtgagcatagctggctctggcccttcccagcctctaggaaaacaaatagtaccacaacggcaaaggcagctgacctggtctctttaaaaaagccaaagtcattggggaaaaacaaccagttgctatgtgtgaaacgtgagtgtgcacttgtgtgaaacaccgagctgatgagggacctatcagatctccataggaatgtgttatttatgtagggatgaagtgtcatgaggtgtacaacatatgccccaggtgtacaacatgtgtttcagcaaagtatacaaagactgatgaacaggtaaggcaaaaaaaaaacaacttttctgtttgttgaaagctttcaaaacctgggggttggcagtggaaacttctggctctgcccactgaattcctgacctcaggcagaatactgtatctggctttgtctctgtttcctcaactgtcaaattgggatgacagtcataggattatatgtattgagataaagtgttgagaacaaattagctgggtgtgatggtgggcgcctgtaatcccagctactcaggaggctgaggcaggagaatcgcttgaacccagggggtggaggttgcagtgagccaagattgcactactgcactccagcctgggcgacagagtgagacttcatctcaaaaaaaaaaaaaaaaatagtgttgagaacagcccctgctgtcattagttcctgtaaatgggcctgacgctgtccctgctggtaatgagaagtgtgtgtttactgtctaacacccagtaaatgcccaggccattctgtttcttccacagaatcacagtgttgtgatctctcacacttcaccagtgagaattaaggcttacagaaacaaaaagcgatcacccgtgaaaagaaggagaggccccttattttatttttatctatttattttttaattctccaaactgcttcggaagagtcccttattttatttatttatttatttatttgtttgtttgtttgtttgtttattgagacagagtctcaatcttggttcagtgcaacctctgcctcctgggttcaagtgattctcctgcctcagcctcctgagtagctgggattacaggcgcccgccaccatgcatggctaacttttgtatttttagtagagacagggtttcgccatgttggccaagctgatctcgaacttctggcctcaagtgatccacccgcctcggcctcccaaagtactgggattacagacatgagccactgcacccagcctagtcccttaggttaaaagtgaggtttactttgacaagtttcacctttcagtagggctgttcatttcttcctagtttttgtacacagacaccagaaaacaatcacgtctgcagcaaaactggtattctcaagtgctagtttagaaatttgtacctgtattgcaaagatatttttcccttaataccttaaaaataacacctaacttctttaagagatttagagaaagcattgttccaaattcaagtacctgcttacctctgagggtgaggggaggaggacatacgtggttccgtctttattgctaaggatttctttcttataccaggtgataggtacatggtgctaaaatacaattttcagaaaaaggtaaaatcatgactgtcatacagatgtaaaaataatagtcaaaaaaatgtattttactcataagggaaccagggaaatgttataactggttcaaaggaaaagctaaaaggaaaagctaacagattatatggaatcaacaaatgttgagctgaattgcaaatgacgacaaaactggtgtttttacagggaggaggacgtcaattcagtcaccactagacaggacagcacttgcacctctgttacctacaattaagaaagagatgcaaaatatctcaaagaatgaacagggccatagttcaatgctacgagtcttgccttgcaagcacccttcactctgttgtgtgagtctggcaaaacacccatccccatgcttaataaccatgccagcctgctctagcagctcttaacagatgatgttgctagggagaaaggaaacaagaggctgactgtactcttttatgttcccaccccaatcccaaacagacaagcaattctcctagccagtgttgtcttttcccctagtaaattcactctcctactctgtaagatgattattctttccgcatatctcccagactgatcgtgctggaggatgtcctcaaatctgttccctaaaaaagaaatagatgcccctgaggagagtcgttcaacatacctgcaaccagacagcacaccctgcccccctttccgttacaagaagaggcacactgcttcccaggcagcacccccaccagagtcctggttcgtccattattgccctcccaaacattttgttcttgtaattattccctttctttccttcaccaaattcacctctcagattaccattgcataaaaacatgctttaatatctctcccagcttttaaaactaaggagttgagtcacacaaagtatattctccgaccacactggaattaagttagaaatcaatagtaagatggctagaaaatccccaaatagttggaaaccaacaaaatacactttcaaacacccttagtcgaaaagatatcaaaagttaagaaaacaacaacaacaaaattttttaaagatattgaaagttaaattcaaaagtattttgaactgaatgaaactgaaaacaacatatcaatgtttgtgggatggcactaaagcggtacttcgagggaaatgtatactacgtaatgcctacactagaaaagaactgtctcaaacaatgacctcagcttccatggtaagaaactagaataagagcaaatgaaaccccaaatgagcagatgaaaggaaataaagatcagaacaaaaattagtataatcagaagagagcaataaaggtaaaaaaaaaaatcaatgaagccaaaagccggttccttgaggaaaaacaaaaagtgctaaacctctagccagagagatcagaaaaagaaaaaaaaaatgaaagacacagattaccaatgtcaggaatgagaagtagcatcattatgattaataagaagataataaggggttgggcacagtggctcacacctaaaatcccagctctttgggaagccgaggcaggtggatcacctgaggtcaggagttcaagcccagcgggccaacagggtgaaaccccatctctactagaaatacaaaaactagccagacattgtggcagacacctgtaatcccagctactctggaggctgaggcaggagaatcgcttgaacccaggtggagattgcagtgaaccgagatcatgccactgcactccagcctgggcaacagagtaagactgtctaaaaaaaaaaagagcattttactaacaacctcaaatcattggaattaacaacttacataaaatgtacacatttattaatatttagaaaaacactaagctcactgaagaagaaatggaaaacctgaatagctctatgtctgtaaagtgaagtttcaaatactctttggaaagaaagaaagattggttggggcataaagggaaccacacccagcaggtgcccagctattaacttgactttgatagagaaagtggactcggtggcagggcacaggcagttcagccagatctgcttgagtaaagcagagtcatgatgagatggtggctctctgctaatctcagagtcgctaatcaaacacactcagatcaaacacgtgggttacagtgaagaagacgaatgaaggaatccaattgcccgtctataccttgacacacctttgacaattcctttgttttgtgggtacacatttcatggggagatgccatatattttacatattaactgtgactttggataaaacaaaaatgcagacacttttagcaaacgggttatgtaacaattagataaaacattctaataaatggcttacggcatagtaggagcttcataaacattctctctcatttgagggcatactaggaaccacacagagattgcctgcccatgcctggaagtctaattacaggacatcttttttctctaattcttaagtttcagtttctcttaagaaaggggatgtatgtcctgagaagcacttagtgtgtaaataatttcattgcatcttaagataaagcaaacatctgcattttgcagtgggtgatgggtgcacatccaagaaaattacttggcacatgttttcctccctttgggattctcccaaaatagttttaattcaactgtcacctgtctcaggccccctactgacccatcaccatccagttttgctttcagagagcccgacctcttagccctgcaaaccattgcttggctctgttaggatcaaaagagggatgtgtcttggcatgacccaatacacagctcatggaaagggtagacccaggagtgggggcattaggaaactttctggaacattcagcccctcgagttgcagcactggaatgcagaacttagctctgctgtacagcccagagcaaccatgccggcctgcagccataaggcaccttcaggctgcaacaattccgagaattgacgtctctgtacacgcaggtcccaataccacttataatgtgtacgaggtgttagtctcagataaacaggactgggcactttggctgcaaacaaagcagcatctggtgggacacacggaggcacaaggaggtacaagaggagttgttcatgacacggggtcagaatccatgccttccattagctgggctacttactcggatctccataatcccaatataggtgagaaggtgtctataccctgtgaagtataattttggcagaacaaggtacatttcttaggatatggactatcccaggaagtccatccctcacaaggatttaccattcggaactgcccagtcctgacactaaaagacaacacaggagatttagggtcacactagctattgcagaaagtcagtccctaacttttctgtaatcaccacaattctataactttcagtcatctatgccagaattcccatttttgggaacagtaatagattgaaggctggctgccaagaagatatgtccatgtgtcagaatctatgaatattttctttggaagaaagatttttgcaaatgtaattaaggatttcaagctgagctcatcctggattatctgggtgggccctaaatcaatgacaagtgtctttttacaaaacagagagacaaggcaggcatatgaagacaggttgattagagggatgtggccgtagccccaagccaaggaaagcctgcagcccacaaaagctggaagagtcaaggaaagatttctctctagagactttggagggaatgcagctatactgacagcttgatttcagaattctggcctccagaactatgagagtaaatctccgttgtaagtcaccaagtttggggttatctgtttcattttgttttgttttttgagacgaagtctcgctctgttgcccaggctggagtgcagtgatgcgatctcggctcactgaaacctctgcctcccgggttcaagctcaggagcagctgggattacggacacataccaccacaccctgctaagttttgtatttttgtaaagacggggtttcaccatgttggccaggctggtctcaaactccagacctcaagtgatccacctgccttggcctcccagagtgctgggattacaggcatgagccaccacgcccgcccggatcatgtgttatggcagccctaggaaagtgaaacagaaacccgaacataagcagatatcctgtgactgaaattaaccctccaacaacttcccactctggccttagctaactatgaacctctctgctcactcatacagaagggcttccaatttttacccagttctctggagcctagaagcaaaaagctatgacaacctttttcttgatccggcagcagactcatccaccttgtctcagagcagcagtggcagcagcagccgcgtgcctgaagccctctgtcgccttacccctggagcctcctttaacatagggccctccggctgcacagtttttgctgctcactgaaaatagtcaacatttctgagaaaactgattcacctcccgagacattagaacgagatctcaaatgcctagaacaactgactgctgtacgtgtcttcacgtttttgttccttacatacctttgtttttagttactttcgttccttatttacctttgtttttttttgttttttttttttccctttctctgctggtttaaggttctggattgcaaatagctacttgttatctcctaactatgtcacccatgtgggcccctgttcctaatactgcctttgtactacccctcgtgactccatggcttaaacataatttaaccaaccattggaattatgtccacatttgatatgttttggatctatgtccccacccaaatctcatgtcaataatcctcccagtgctggaggtgggtcctcgtgggactgattggatcatgggggcgggttcccatgaatgggttagcgccatccccccagtgttgtctcgtgatagagttctcatgagatctggctgtttaaaagtgtgcggcctctcctccctttctttcttccttctactctagccatgtaagttgtacctgcttcccctttgccttccgccacgattgtaaatttcctgaggcctccccagccatgcttcctgaacagcctgtggaactgtgagccaattaaacctcttttatttgtaagttacccagtctcagaaattgctttacagcagggagagaatggactgatacaacatccctttgagcatttcccagtttccattagtactgatcccttgtagtgaatcagttggttgtataaacggcaaatactataacaagccagatggccaaaaaccaagtactctttataacgtcatgcaaaaaagtgggaattttctgtctccgttaaaatgaaacttgggtatcctttcatagaaattagcacttcaaccaaacttactaatagagcttgtaagcaaccaactgatatgggactaactgtacaagtaaaagattctgcttttacacagatgctttaaggaaggtttctacttacgcttagtctccttgactatggaactatgtgctgatgtctgcatttcactgtctggtgctggaatagacttgtattgacttgtgtcaaagctgtaggacaattacacaacatcatggggtattttggcaaacaatggaactttgggtggcctccagtgactgatagtggatttatgctacaaaagcttattggctactgcccacaaatcagacagagatgtgccaacccaataagctgatgccaactatcaggaaagttcctgatatttctctgggtccctttggcccattgatttcccctcattaaaaaaaaaaaaaaaaaaaaagtcttcaaatctcttaattcaagataaagaatccaggcatggtgactcgtgcctatattccctgcactctgggaggccaagacaggaggattgcttgaggccaggagttcaagaccagcctgggcaatataatgagatcccatctctacaaaaaatttaaaaattagctggccatagtggcacatacatgtagtcccaactgctggggagactgaggcaggaggatcccttgagcctgggagtttaaggctgcagtgagctctgatcatgtccctgcactccagcctaggcaacagagcaagacactgtctcaaaaaaaaaaaaagaaaaagaaaagaaaagaaaatgtgagcttcaatttaaaaccctaaatcttaacctttgaggaacaattccgtgctgctttattctgtcttcaggcatacctatttcacactttacagaaggcccaaaaagtggctcaaaaaaaccctacgtgtcttggttcagagactgacagagaactagggagtgtgattaaagccagaggtctccttgcctaagaaattcacaggactggattgacagtgggttaaaaagagtcattctagacatactactgccttctcaaggcagaacaggcaccttcttagagaatgttaaacttccatcctacagtcttttctatgatctttaatattatagagatctgggaaataaaggcattagaaaattcagcaatttgggctgggtgtggtggctcatgcctgtaattccagcactttgggaggccctggtgggcaatcacctgaggtcaggcgttcaagaccagcctgtccaatatagtggaaccccatctctactaaaaaaatacaaaagttaggagataacacctggctaattttgtattgtttttaagtagagatggtgtagtgcacgactgcagccccagctccttgggaggctgaggcaggagaatcgcttgaacctgggaggtgaagtttgcagtgagcctagatcacaccattgcactccagcctgggcaacagattgagactctgtctcaaaaaaaaaacagaaaaaaaagaaaattcagtaatctggtcgatattcccacatccagttctttgggctcttcaaacagagcagatagtatctgctttcttggcttaaattgtgcaaatttggttcctggctgagaagtagactccaaacagttcttcagtgttgcagtgatcaaacatgtacttctacagaatcataaatgttgccacacagctgctattttatcaatgatcttattgacaaaaacaagaagacctaatatctactgaaactgaagtgacttccaaccatgaatattccatccagtgctgtaagtcaaagttgttttctcttccatagatgtggttgaaatatgattcaaaaattatgtctcagaaatagaaaagtgaagaaattataacttgtcaagcagattaattatatagagaccacagacttaaaatccagatagattggttcaaattcaaacaccttgagtgtcagtttgttcggtggagtcatgttttagaaagataagctcataaactgttcaaatacaaacaacgttagcacctctcctagtttacaaattctgaccaaccataatgtaaacctcaattataaacttctgctctaagatcaccctatgactaaccatccaaacataaaacctcgtagctcaagaccctgggggagtctattgggtggaattattcagccagtggctcccttgcttagtaagtttctaataaagttagcttcttttttttttttttttttttttaataatcaggtttttctggtggtcttacatgagtctttgaaagctcattctgtaatattcaggaagcagtaaagaagtctttttatacccttgaacttgctttctttcctactgtttatagccaatgattctgggatagagaatttaagaatagcgatgttgtttgttcaaattacatattcccttactttccccaatctccaacaagatcctgccatgcaacccaaaactcagaagcacaactgcagtaagccagtgccagtgaaggaggtaagttgcttctccaagtagtgctagagaaagtgttgaaaacattggccatgttgaaattatccatgcaaaaccatgttaagttggagatatgacaataagttagtataacatttgctggggccaggcaccgtggttcacgcctgtaatcccagcactttgggaggccgaggcaggtagatcacctgaggtcaggagttcaagaccagtctggcgaacatggcaaaatcttgtctctactaaaaatacaaaaacttagcggagcctggtggcacacctgtaatcccagctacttgggaggctgaggcatgagaattgcttgaacctgggaggcggagattgcagtgagccgagatcacactgctacactctagcctgggcaacagagtgaaactgtgttgcaaaacacaaacaaacaaaaaaacaaaaacacacacacacgtttgcaaaaaacataacctcaaagagtagctcttcaagtcactactcccatctctctatgccatgtgatatcacctgctttctcactaggtgagggcttggtgggggtggtcaaggaagaacacatcagggagaagcaccagaggtagcaaggtcacaggtgtggggcctggaagcgtcatcgctgctcacatcattagtgctgctggtgctggtcctcaccccaaccccatgtctgagctcaggagaactagagccccgccgtccctcctgtgcctccacttcatgctagaggccttaaaggactgcaaccacaagaaacacaaacaggcccctggcagggctggtctttggacaattgtgaaagacacaaaagaagacagcttctagaggcgggcatggtggctcacgcctgtaatcccagtactttgggaggccgaggcaggtgagtcacttgagatcaggagttcgagaccatcctgaccaacatggtgaaaccctgtctctactaaaaatacaaaaattaggccgggtgcagtggctcacgcctataattccagctacttgggaggctgaggtaggagaatcgcttgaacccgggaggtggaagttgcagtgagccaggatgacaccactgcgctctagcctgggcgatagagtgagactgcgtctcaaaaaataaataaataaaataaaatcagccaggcacagtggtgcatgcctgtaatcccagctactcaggaggctgaggcaggagaatcacttgaacccgggaaggggaggttgcagtgagctgaaatcataccaatgcactacctgggtgacagagtaagactccgtctcaaaaaaaaaaaaaaaagaaaagacagcttctgggactctcacaatgcagtgagaattcttgagttcttggaatggatgcattaacctctgttttcaagatggagaaggaagccaagtatggggatgctattctgtacagggggaagatctgaagattcaaacagaaggcacaaatccaggaggcagtccacaagcctacaaaaatgtatatcctacaagattcaggttgctaattttggagaacaactttctgaacccagcttatgaaggccacctaatggtggggactcccactcatgacaaggtgtggaaaatctgacaaagaaaattatagaactcctaatcctctttggccaatatgaactgaagcttcagaacaaagttccaggcctcccaaaaagtcttgatccagcctgttgccattttaatccaaaacgcactatggttatagcattgcagctgggatggagtaattgtatcctcagaatcaggagcagttgtatgcaagggcttcaaacttactcaatagcagaatttgtgtaggtgatttgaatacttagggtcacttgagatcagtgccatcaagaccagcttttgggagatctcagtctcccaagcagttgtccctcacaagaaactccatgccaagggcagattgctccctgttcagatggaaaacatcaagcactcacactcagagctcatcagctgctggcttcagcttgagcaagaagtcttcagtgtcccagcaggtgatatctcactaccaacttgctgtgcacagatttgctgctgctctatcaagatgcacaggccaggctgggtgttgtgtggctcacacctataatcctagccctgttgggaggccaaagcagaaggattgtatgaacccaggagttcaagaccagcctgggcaacacagcaagacctcgtctctaaaaacaaagacaaaaacaaaaaaaaaactagccagacatggtagcatgtacccatagtccccaccccccccgaaaaaaatgcacagaccaactagaatccaaggataaccattctgacattcatgggtcccatctctaacagctacttcaccacataccagagacaccaagggttccctcagcccaggtctccatgccaaccaggctcaagttttaaaccctagaaattaggttctctagggccaacgagagactagggataaaacctagagctaaaatccaggtcccagctgtgctggcctctgccaaggattcttcaggcttccctgcttcttcatcgtcaggatccctaatcctacaatcagtagccagtgcctttgtccactgccacgcccagctaatttttgtatttttaatagatatggggtttcaccatgttggctaggctggtctcgaactcctgacttcagacaatctgtccccctcggcctcccaaagtgctgggattacaggcatgagctaccatgcccagcctgtattaatttccatgtgtttgtgtaatttccagagttcctcttgttattgatgtctagttttcttccatcttggtcagaaaagatacttgatatgatttctgtttttttgaatgtgttcagacttgttttgtggcctaagatatggtctattctggagaatgttctatgtactgatgaaaatgtgtattctgcaacagttgggtgaaatgttctcctattgtgagttaggcctattagatgtagtgtgtagtttaactctgatgtttcctttttgattttctatctgaataatctgtacattaaaagtcttctactattattgtatttcagtctgtctttccctttaaatctattcatgtttgctttatatacttgagggctgcagtgttggttgcatatacgtttataattgttatttcatatcttctcgccaaattgatccttttatcattacatagggaccttctttgtttcattttagtctttgatttgtagtctattttatctgatataagtggagctactcctgctgttttttggtttccaattgcatggaatatctttttccatgcctacactttcagtccatgtgtgtctttataggtaaagtgggtttcttgttggcagcatatatgggtcttgtttctttatccattcagcctctctatgccttttaattggagaactgagtccatttatgttgtttcattactgacaagtaagaacatactactgccattatgttggttgttttctggttgttttgtaacccctctcttcttttctcactgtcttcctttgtggttaaggtatttcctctggaaatatgttttaattcattgctgtttatttctggtgaatttattataggtttttgtgttgtgattaccatgaaacttacaaaaaacatcttagaggccaggtgtggtggctcttgcctgtagtcccagcactttgggaggctgaagtgggtggatcacggggtcaagagtcgaagaccagcctggcccacatggtgaaacctcatcgctactaaaaatatgaaaattagccgggcatgatggcaggtgcctgtaatcccagctgctcgggaggctgaggcaggagaatcgcttgagcctgggaggcagaggatgcagtgagccaagataatgccattgcactccagcctgggtgacagagcaagactccgtctcaaaaaaaaaaaaaaaaaaaaaaattcatagagatagaacaagttattttaaagagatgacaacttagatcacaaagaaacaaaaaacaaaaaaaagtttacactttaactccatcccctcccacacattttgacttttaattgtctcaatttatatattttatttcacctcttaactagttgctattgctattattattttttgatagtcttttgggtttcatatgagagtgatgagtggaccgcacaccatacttatagcattaaaatattctgggtttgtccatgtacttaattgtacctgtgggttttataccttcaattgctttctcttttcacattaatgttttttctttcagattgaagaactccctttagcatttctaaatgccacgggtctagcagtggtaaattctctcataattcagtagtgctcattagcttatttttatatgtagtaactttaaggtttttgtctttctttgagtgagattctctgcctcagatttgatccacggccatcctttcttaagttactaaggcacacattaggcttggcctcagccagccccctagtggtacagctcatgcccccaagagtcccctactcttctcctacatcacacggggacactggagttgttcccagggtgtatccttggtctgggtcattttctgtgttgagatgacatcatggccggcaaacaaagacagtgttatctgttgctctttttatgcaatgccaagtaccagcctacccaagcctccatcctactgccagccagcgtggaaaggcctcattggcattcagcaccaggcttccagacactcaggcacccaacagttgccaccatacctcagctgcctgccctttcacacagaggagggtgggcaagtgagagctcatgtttcccaccaaggaagggatttatcaggcagtgggagagggagaagcttaagagaagaagagactagaagtttccctctcctccagtccctcattcgacaatctctgcaaccttcagagaatggctcctctgttcctgaatgctgaatagttagtggatgactggacatttctcagagagctcgtggccctctgctagctgccctcaggaggatctggggcctgccagagttagctataaagggatgctgggttttggaaggaagaagaaacagctctcctccataaggaaaggtcctaaaactgctcagggatggagaggcaacctggctgggcctggccttcccccacacagggcaccaggcatgtgactgagattatcttggaccctccagcccaccccagccaccaataaatatcaccaagaaattccaatgaacaccacatgaagcaaaagaactgatcatctatgtcctgcccgaattccctgacccacagaagcataagaatagttgtcattttaagccaatatattttggggtaatttgttacgtagtaacagacagctagaacccctgaccaatataactctcaataggaaatgggcaaataccttaaacagataattcacgatagaagaaatattgactactgagaatatgaagaaattatttcccaaattcattattaataataaactgaaacaaacagactatgtgtcaacttgggaagtttgtgtttttgtttttaatacctggtatttgcaagactgtggtagaagtgctattttcttgtactcctgatactatggttttaatttttgttccttctaaaactcatgttaaaccgaggcaggtggatcacttgaggtcaggaatttgagaacagcttggccaacatggtgaaatcccatctctactaaaaatacaaaaactagctggccatggtggcaggtgcctgttatcccagctgcttgggaggctgaagaaggagaatcacttgaacccagatagcagaggctgcagtgagtcgagatcgtgccactgcactttagcctgggtgacagagcaagactccatctcagaaaacagaaacaaaaacaaaaacaaacaaacaaacaaacaaaaacttaacccccagtgtggcagtactgagaggtggggcctttaagaggtgattggctcatggccctgcgccatgagtggattaatccatccatggactaatgggttatcacaggagtcggattggaagctttataagaggaaaagggacctgagctagcatgctcacccctctcagcactctacagagagtctccaccagcaagtaggcagatgcacccctttgaccttgtacttcccagcctccagaactataagaaataaattggttctttataaattacccactatcagatactctcttataagcaatggaaaatggattaagatacctgactatgaatatgtctggtttttttcttttttttttgaaacagggtctcactctgtaacttaggcctagagtacagtggacacaatcacagctcactgcagcctcaaaatcctgggctcaagggatcctcctatctcagcacccagagtagatggaactacaggcacacaccaccacagtggcctatttttttttttttttttttttttactttttgcagcaatagaggtcttgctatattgtctagactggtctgaaactcctgtcctcaagcaatcctcctgccttggccttctttaagcactgggattacaagtgtaagccaccatgcctggcccaaatacaagtctttatgaagaattttctcaacaggcttcagcagccttagattttttttatatacatatatacactgtgactgttaattctacttccaggagtttatcctcccacagaaataatcagatgtgcataatgctttatagacacaataatccctgatacacaattaaccagaagagaaaactggacacaacttaagagtccaaaaatatagcagtcattaaattgcagcacgtcacacaatgaagtattttgccaatattaaaaatgtttaagaaacttataaaattataggtgaattttatttcctttataggttatttttcctctgaaacttttttctgtttgtttttttgtttgtttttgtttttgtttttttgagacaggctctcactcttgcccaggctcaagagcagtggcatgatctcagctcactgtagcctcgacatcccaggcttaagtgatcttcccacctcagcctccaaagtagctgggaccacaagacatgcaccaccatgtctggctaatttttgtatttttttttgtagagatgggtgttgctgtgttgcccaggcttgtcttcaactcctggcctcaaggaatctgccctcattggcctctcagtgtgcttggtattataggcatgtgccaccatgtccagactaaaacattttctaattacaaaaattgtatgcatcataaagctttaaacttgcttttcaagacaaaagaagaaattttgaagaaacaaaccgctacaaaagcaaaaataatggtaggaaacgtgtagattaagagatacagtgtatgcaccttatttagatcttaatgcaaataaaatgtattttaaaaatgagataattgtggaaatttaaatactggctggatatttgattaagagtttattttattttattttattttttgagatagagttttgctcttgtcacccaggctggagtgcaatagcatgatcttggctcactgcaacctccgcctcccgggttcaagcgattctcgtgcctcagcctcccaagtagctgggactacaggcacctgccgccacacccggctaatttttgtatttttagtggagatggggtttctctatattggccaggcttgtctcaaactcctgacctccggtgttctgcgccgcggcctcccaaagtgctgggattacaacgtgagccaccgtgccctaagagttaatttttttaaaaaaacatgaaataatgatattttagttccacttttaacaagagttataccttacagattaacacacacacccctcccaataagactggtagacatttcaccatgagtatttgaggagaaagtggggatggacctgagaaagaagacagtaaaagtgtttcccaatgagaaataaaaaaattcggccaggcgtggtggttcatgcctgtaatcccagcactttgggaggctgagtgtgggcggatcatttgaggtcaggagttcgagaccagcctggtcaacacggtgaaacgctgtctctactaaaaatacaaaaaaattagccatgcgtggtggcacatgcctgtaatcccagctactcgggaggctgaaacaggagaatcatttaaacccaggaggcggaggttgcagtgagccgagatcgtgccactgcactgcagcctgggtgacagagtgagactccacctcaaaaaaaaaataataataataattctaagcctttcaactgactgaatggatcctctctttgccaaggggactccagagaaaccttgaaagctgagttcacagccatgataagataggagatcaaacacacctcattatacctactctctcgctaacagtacttaggttttcttccataaggactaaacagaaaccagtctttgcaaaagactactagctcaacttcccaggcacagaacaaggacaagatgaaactaatcattccttcatccctccccaagactcagccttttctatttcctatttctccaaatcttcaccttatcttacgtaaaatgttgatttcctgggcactaactaaagtcttacaagtatgtaatcatttgcctcactgctgcccccaaccccttttttttaaggaaaatgtaataaatactaaatcttttaagaacctccttggaaaaaccagccactgattctatgactcgtgtttttcccctgtgcatcctcaagctggctcaataaaccttggtggtttgagacttagtgcctcagtcactcattttggttgtaattttggtaaccatgaagggattacggagaagagattagctcctttgacctgcagcaattctccttccaacaagagattccctctgactatgcaaattgcaaaggttcagaagcttgctctctctcctgaggttccctgatctcctgaaatttttggtttgagattcaaggtttattttgccaggaaactcctctagaaaaggagtttgctcacttccaataacgaaggtgagtttgctgcttccatgccaacaaagagcagtcttcagcttgggctccatctccaggcaaggaagtggtttgggatttcatttggggatttggtagttgaaggtcaaggtttactgacaactggctataacttctcctttatactcagaggtcccagcaatatgtaaattttgctattgctttttctgttttttttgtttcagtccatcttctgttagatttgaccaattcttaccacatctccatgttgattaaaacccctgcagctgcagaaaatcaagtttcaaccctaggaacactggctggttaagataaatcaatattttaccctcccaaaaaatttttaaaattattttacccccccaaaaattatatatatatatatatatatatatatatatatatatatatatatatatatatatatattttttttttttttttgagacagactcttctcaaagagaagaggctacagttgtccaggccagagtccagtggtgcatctcagctcacttcagccttgacttcccaggctcaggtggttctcccacatcaacctccccagtagtttggactacaggtgcatgccaccatgtcaggctaattttttgtatttgtggtagaaatggggtttcactatgttgcccaggctggccaaaatatatatctttgacatattttaaagtagccctgccagactttctctagcctgaatctaggaaaggttagctaaggtcttcattctgaaggttcccttgtacacatgttaaataaatgtgcatgcctttcctactcatcatctgcttcacaccagtgatttttttcagtgaacctttagggggccaagggcctatgactcctgcagtgtggcacagcaagcagagtggacaaagccattcttctcttctggaacccacagtgaagagaacccaggaacctgatctgccagccaagaactaggaatttctcaccagccaggctctctgtggactccagctgggtggatggtaaaaatcactgtctcatctccaaggttctttttttgttttgtttttgtttttgtttttgttttagataggatctcacttcatcacccaggctggagtgcagtggcacaaacacagctcactgcagccccgacctccagggctcaagtgatccttccacctcagcacccccaagttgctgggactgcagacatgcaccaccatgcctaggtaacatttttagtattttttgtagagatggagttttgacatgttgccaagcctgatctcaaactcctgggctcaagtgattctcctgcctcagcctcccaaagtgctgggattgcaggtgtgaaccaccatgtccaacctcatctgcaaagttttgattatgggaaaaaaggatttgtgtaactagtcttgcactgtggtgactctgctgtaactctggtattttgtgttatgagtattcacatcatttgatcccttttcctctaatatccttttttgttgccactttgcttcttctttctgtgtccttctgtcagaatgaaactgacccaattattccacagaactttacagttcaccatctcatagatgtttacagtttcttttgaagaaacatagaaatttacctttccaatcttgaaacttgagaaagttacattcatcttatctgagttcctttctcaagaaatcagccatcaggtctcccagatagaatcaaagaattgaaactcatcggatcaccacacctgaataatgaaatgtcatacctctctccctttatgattgactgacccaccacctgctgcctgttgaccaaggtccctttcctaccccttcctaattcctgttttcctgcatgttgttacatttctgctgtataaactcctatctttagtgagtgaggagacagatttgagactgatctcccatctcctctgctgcagcacccaattaaagcctagcaatactggctgtctcagtgagcagctttctgtgcagtgagaagcgggacctagcctaaacctctagggtttcagtaacaataaaagggggtaccatagggtagaatacgagcctagaactcttgtaagcccctgtaagcctgctgtgaaaacggcactgcagcctggtcagtcttttgtggttctgaccggaccaatgtctgttaagacaaactttactgtgggtccctgaaacaaaaaccagatgaagtttcccactcttcctgtttcgtgtccttgagagcttcactttgtgactaaggggggatactcttagtctctgccatccagaaaatgtgatttttcgggtcctcatctgattttctgagggtccaagacacataatattttaaaaagctcacttttcactctgaacgtatcaggctcttatgggagttttgtcttaaaaggtcccattcctacagggcttttgtcatcttttgctatcttttttttattttttatgttttatttttatttttttttgagacggagttttgctctcgttgctcaggctggagtgcaatggcgtgacctcggctcaccacaaccaccacctcccaggttcaagtgatacccctcctcagcctcccgagtagctgggattacaggcatgtgccaccatgcccagctaattttgtagtttattagagacggggtttctccatgttggtcagtctggtctcaaactcctgacctcaggtgacccgcccacctcagcctcccagagtgctgggattacaggcgtgagccaccgtgcctggccatcttttggtatcttaagtctatttataagagtgaattttgggggatcatgaagatgcctcctctataccctttttaggaatatcttttgcttacatggtaaaaaacgtggaaaattcccacctaggcttgaaagaagcttttggattgtgtcactattggaactaaataaaccactgaaaataaaaaaatgttagagatatcttattccaagcaatgtcaggaaggtactccatatggtctaaaaaggggaggcatgaataatttgccccttgtttagcatataatcaagaaataaccataaaaatgggtaaccagcagccttcagggctgttctgtctatggagtagccattcttgattcctttcctttcttaataaacatgctttcactttatagactcacccctaattctttcttgcacgagatccaagaatcctttctcagggtctggatgaggacccctttccagtaacattgctgcaaaaccaaaagacagttcaggaggtcttatcaaatctgctgtctcaacttctcctcaagagtcttacagatgctagtaaacacattaggctaattaacaagaaaatggtgaaggcatccaggatcatggtggctcacatttgtaatcccagcactatgggaggccgaggcaggcagatcacttatggttaggagtttgagacctgcctgggcaacatagtgaaaccctgtgtctactaaaaatacaaaaaattagctgggtgtggtggtgcacacttgtaatcacagctactcaggaggctggggcacaagaattccttgagcccaggagatgaaggttgcagcaagccaagatcacaccactgcactccagcttgagcaacagagtgagactctgtctccaaaaaaaaaaaaaaaaaatggtgagggcaaaagggggagtcaaaggactcatcccaaaaaggtggggatttttaagcagttatttacaaagtaaggtaaaacttaaaaatcattgatgggttgaaactaagagaaaaaagaaagggcaaatcatggaacccatcacagcagggtggaaatctttagatggttattaagaaatgaaacgaaggctaggcacggtggctcaccgctataatcccaacacatttggaggccgaggcaggtggatcaactcaggtcaggagtgtgagaccagccttgacaaacatggagaaaccccatctctactaaaaatgcaaaattagccaggtgtggtggtgcatgcctgtaatcctagctactcgggaggctgaggcagaagacttgcttgaacccaggaggtagaggctgcagtgagctgagattgcgccactgcactccagcctgggcaacaagagcaaaactgcatctcataaaaaaaaaaaaaattagctgggtgtggtggtgggcacttgtaatcccagctactcgggaggctgaggcagagaattacttgaacctgggaggtggaggttgcagtgagccaagatcacatggcactccagcctaggtgacaaagtgagattccacctcaaaattaaaaaaaaaaaaaaaaagaaagaaagaaagaaatgaaatgaataaaatggaaattggcactaaaataaaggtcttaatacaacactattgaaagttgggtgtttgtatgagggttttaagaaaaaaaaaagaaagttgggaaaccaaagagagccccagctggtcctctaacatttgtcctccaagggccccaaatcagtgccatatttaccctagattggagagatttatgaaaaaatatgagggcagagattacaatgagagagctgaagaattgcctgcgacaatgttcatcaagataagattgatgaaaggagccagggttccttggttcagcacccctgctggggactcaaagcctttttcaccaggaagggtaaaatggtctgggattggacaagaaaaggtgcctgggaccagaacataaagatgcaagggttgatagaattaagaaagttggaatgtttcaacaggttttatgtctgtgaaaggaaaataaaatcttgggaccccaaactcactaagccaaagggaaatgtcaagcttgggaactgagtcacacaaaactgcctatttttgttcctacaaagataaaagcccacatccctccccaggggtgctctctcacaatttgcccacaaggaaattccttgcaggccctaagatccttaccctaaagcagttctgttgaatttctccctgacaatgtaagttaatagcttatcttagcaagtaggggacaaagacaggaccagaagtcatccctccacctacctgagacaaatgcatattaatgcagattcactgagcctgagatgaatgcataattgactatttatctacccacagtaacatgtggattcaaagaatgttgattaaagctgcaaaagaatgtaaccacttgcctcttttcacacccctccttcactttttttcttctcttgtctttccctactgcctgcctgctctttcccttcatctttgttttctttttttgaaatggagtctcgttctatcacccaggctggagtgcaatggtgcaatcttggctcactgcaacctctgcctcccgggctcaagcgattcttgtgcctcagccttccaagtagctgggattacaggcatgcaccaccatgcccaactaatttttgtatttttagtagacacagggttttgcaatgttagtcgggctggtcctcaagtcctgacctcaagtgatcgcccacctccgcctcccaaagtgctgggacaacaggcatgagctgccactcccggcctcccctttaaatcatgaaggtctcaaaccttctttggaaaaataatggatcacagatgctcctgtggttttgtgttcctttttcctgggcatgtcctcaaccttggcaaaataaacctctaaattgattgagacctgtctcagatactttttggtttacaatgtaaagtagttgtatctcctttacctaaatgacttttaaaatagttattgtatcagactggggaaatgtttcccctacctagcatcataaagcagaaggcatgtaaatctgcccttccggcaatgttaattagacatgctaaatgagacccagtaagactgcctgagcccacagggtgtgtggatgctgatagggacaaattctccacttcatagccctttgtggagcagttacggtctgtatgagtcagttctcatgctgctataaataaataaccaagactgagtgatttatagtgaaaggaagtttaatggactcacagttctgcatggctggggaggcctcaggaaagttacaatcatggctgaaggtgaagcagaagcaggcaccctcttcacaaggtagtaacgtgtactcccctggagtgtattttaaagcactgggactccttcgaccctgaaattttgaagaaaagtggcttattttcttttgcacaagggcttggcctttttactagacctttgcaggtgttgcaaaatcaaccaagctcttttagcaatcatatcaggcaggcccaaagagaataattccccaaaattagtaaaccaagttccaggggaaccatctgaggattcccttatttggggccccttcaacaccccttctcactgcagaaccttagacaagtaaaatgagacttaggccaattttctgatgaccctgatagatatatagaagctttccaaaatttaactcaggtatttgacctctcatggaggaatgttgtgcctctcctaagccaaactctaactgcagctaaaacaggcagctctgaatgcagaagaaaattttggagatgagcaatatgtctcctatagtagggccaaaagggaaaagagaaaatagggaaggcaaagaaataggggaaacaccattcccaataggaaaagaggcaaaacctcttgacaaccctaattggaactcctttctgtggtgtttttccttctttcatggtttaaaacggcttctatctcttttataatgttcttccaacctgggaaaagttaattttccaaaccttaaaatgcttggcttagagttgagctagggggaagggaacccagaagcctgatatgccggcaaaagggtaaaaatttcttacggatcgggctttcagcttttctctccctgtgcaaacaagtaaaagggttaataagaaccattgtgtatattctctgtaaatgtataattaatgaaaaaggatttgtgaggttgctcttaagctgtagacaatctggtgtgctttgcatgtctttctgtatggttctgtcaaagaaagggtatctcaggttaggatgcaggcccaggaacccataagcctgctgttcaagccaacccaacagaacagtcagtaacaaacttgcctgcaggcctccatcttgtttcatgtccttggcaacatgacctgtaaccaagtggcaatactttgttttagtctccatcattttacaatggtgtctgtcttcttgtgctgttgagggaagtcagggaccccaaacggagggaccggctgaagccatggcagaagaacgtggattgtgacgattttatggacatgtattagttccccaaattaatacttttgtaatttcttatgcctgtctttactgcaatctctaaacataaattgtaaagatttcatggacacttagcacttccccagtcaatacccttgtgatttcctatgcctgtctttactttaatcttttaatcctgtcagccaagaaggatgtatatcgtctcaggaccctgtaataattgcgttaagtacacaaattgtacagcatgtgtgtttgagcaatatgaaatgtgggcaccctgaaaaaagaacaggataacagcaattgttcagggaacaagagagataaccttaaactctgaccgctggtgagccaggcagaacagagccatatttctcttccttcaaaagcaaatgggagaaatatcgctgaattctttttctcagcatgggatatccctgagaaagagaatgcgcacctaggggtaggtctctgaactggcccccccggggcgtactgtctcttatggtcgaggttgcagaggtgaaataaactccagtctcccatagcgctcccagacttattaggaagaggaaattcccgcctaaaaaactttggtcagaccggttgatctcaaaaccctgtctcctgataagatgttatcaatgacaatggtgccggaaacttcattagcaattttaatttcgtttccatcctgtggtcctgtgatctcgccctgcctccaattgccttgtgatattctattaccctgttaagtacttgatgtctgtcacccacacctattcgcacactccctccccttttgaaaatccctaataaaaacttgctggtttctgtggcttgtggggcatcacggatcctaccaacgtgtgatgtctcccccggacgcccagctttaaaatttctctcttttgtactctgtccctttatttctcaagccatccgatgcttaggaacatagaaaagaacctacatgactatcggggcaggtcccccgatattgtgctaactcaattcctgggtgagggccacaaaatcagataagccagtttgtcaatctgggtggtgccccctgatccatcaagggcaggatttacaaaatatcttaagcactaatcttgagtgcagttttaggagggtcaaaatcttgtagcctccagatgcatgactcctaaaccatggtttctaatcttatagctagtttcttggtctggtccccaggcaagagggaagtatatcttaagaaggagctgttctttgggaggccgaggtgggcggatcacgaggtcaggagatcgagaccatcctggctaacacgatgaaaccccatctctactaaaaatacaaaaagtagctggttgttgtggccagcacctgtagtcccagctactcaggaggctgaggcaggagaatggcgttgaacccgggaggcagagcttgctgtgagccgagatcacgccactgcactccagcctgggtgacagagtgagactccaaagaaaagaaaaggagctgttatcatctttgttttagactatagattataaaccaggctgctcccaaagttggttcggactacccccagggatgggcaagaacagcttggggctggaaaacaaatgcagctgtttgggtcagatctctttcgctgtctcagtcacaattttgcagtaacagtttcaaaagctgcctatcacccctttgaaaataccttgtacattcaaggttaagtcataacctaattaagccataaacctaattaagacttgtcagtttcacctgtgaggtttcaaaagctgaacatcttaactgcttcctgtggctaaagtcgagtcacaagggatttaaaaggatttttcttaatgagtgctcagcttaattaaaagtggatattcaagttataaatatatttaaaaggcctttatgttttttgcttcttggattttgtttttctggtaaaaggcttttttcttctcagtcgactgaattatttttctccattttttgtcttaccactcttactgcttgctgcctggcactgttcctccaagggctccaccctgacgccagtaatccaattaagaaactggcaaatgaaaaatcttacaagtgctgaatcttctgtctgttcgtgttgctctatacatgttgtgtgtaaggtctattaaaagagctctaattgactggcttaaagaaaaacaagtgcttaaatcaaatattttttagttcacataactttaagaaataaaaatagtcttaaggattattggtaaaatgcaagtgttgtcaaaatacaaataggtggtctaaatcattcagcttagatactaggtttgctaaatgttccaaggctgtgtatactgcccgcttttcagataggtaaggcttgggacacatggacctagatgctgaaacgtcagactttatctgcacttctgtctgagtcctaggatccacatctggtacataattaaaatagattactaaccaggtttttcaccaaaaataaaagttgctaaaagttcaacagtgaacattaactaaacttaaaagtgtattatatgatcttttcataaattgagcattgaaataaaagcacagcaaagaggtcttacgacactaatctgtcctttagtaaaagggttatgaaaggtttgtaaagatttcacctcatggtcaaattggttaaggttagatggaatgatctataaggtttaatttaaacaaattggggttaatattaataaactaatgcaagggtaaaatttgggtttgaacaggattttcatgtcatagtaaaggccaacgaacagtttttgccttttaagtcaccattttggcaaaagaaataatgtatggcaatctggaattccatttcataacatcaagtgttttaaaccttgaacatttaacaggcatcctaaaatcagacttcaagtttcaaaattgtcgttcctgatgcctggctttttgatggttcagagggcccctgaaacattcagaaaagagataaacaggattatctgacatatttaatcacatgagattgccaaaatgatgtccaatcttaagttatactttgctaaataatactaatatattctggccgggcacagtggctcaagcctataatcctagtgctttgggaggctgaggcaggtggatcacctgaggtcaggagttcaagaccagcctggccaacatggtgaaactccatctcaactaaaaatacaaaaaaattagccaggtgtggtggcaggtgcctgtaatcccagctactttgggaggctgaggcaggaaaatcacttgaacccagaaggcagagtttgcaatgagccaagatcatgccactgcactccagcctgagcaacaagagcaaaactccatttcataaaaataattttaaaaaatactattatatgttccaaaattacatatgatttctaaaattctgatgtctaagtatatgctatcaatcataattaagggtaaagttattgtaaaccactgaaatgaataaatttgttaatcatgttgttaactataaatatcctggaaatcttgtcattcacagacaattgttatcttgctttgttccttctcaaaagatggtttataatcaagctatattaaagaatttaacaggcattctcaaatacaggtttttagtagctttgaagattgtaacattggaatagagaatgtatgggactcataatgagcttacatgttcacaaatatcaagcaaaacaagatttaactagacggacagcactcagaaggttaaagcaactttttgactcttgcttggaatattgctgatccttgttttatttttcagagtgaaggaaacttactttgaactatttatggcctttaataattgagtaaggtatactactgtaaacaaaatttggagtgtgtttgtttttctctgcctggttcctctagaatttggaaactatctgtgagtactcttaacttatggcaatatttgcatcagtgcaataagaatccatttttctttgtcaacaggacacaattgaaaaaactggttattttaccaaggctttgactgaaagggtgtgtttccctttaaggaatgaagcttgacatgcagacccaataaaagccccttaaggagaactggcctcataccttgtctacacagttcctgcacaaggttcctaaattgtggtcagtaaagaatgtcattttctaacaggtccagcagctccaagtttatcttagaccctcaagaggagaggattacccaactcacaggtatttgaggatacaaacccatggctgggctcagctttaaagatcttatctgaaattccttgtggaacagagtttcatcaaagccaatccaaaggcctacatagaaacaaccattcttgctgcactttatgcaaataatcaggccaagtataagactaaagtttattctacgaacaacccacacagtcctatcataatttgtttttaccaaaaatgaggactggagagagaaattgttctccaaagcttatcatacatttgtcattaaatcctagtctcattaattgtttttaagcttttcgcctacattttagactaaccctgcttattcctgtgaatcaagtggtgatctcctgcagcttggaagaatcaaagggggatggttaacataaaaacctggatcaatatgctagttctggacaattctcctgcaaattctgccaggtaatgaaagtgagtagggtgcccataacccagaggtttctttgtttgggaaaataaaaccaaggaacttcatagacctccccaaaaggaaattctatatcttaggttaacacctctagtaaagtagaggaaaattgttagatatgagttctaaatttctcttcaaagaatcaatatgtcagtatgttcaattctttgccttctacttataaacttaacttcctcataaagcaacctttttccattacctgctccacccggactcattctgattacctgcttctccctgactcattctccaccctgactcattccgatttctcactctgccataaccatttttcctgccaaaccgctcaccccgtcactctctttaaattagccaattggaattagtttagtttgtgcgatctaaccctagccaatagggaaatgacacagcatcaggggccacgtgcatcagggataaggaccccttcccctcctttgtccaagtgtgcgctcaccatcgctccatctgtcagggcgcacccttttatagaagaacatggccttgcagagaattaaaaagaaaattttatatttgagtgctatttcttttgcggcaccgaaactttataacaatttcagggctcacccttgattacatttcccccaggggcggtctccggttctctctcctgaggaggcgcaccccgcccccttgtggtggcctcaggggtgagaaatcaggaccacccagtgcgaggaataaccggagctctctgcaacgctgaaagaaactggccagcaacctagcttaaaggatcctcacatctgcggcgatgactctgtgcacagaccaaggaaggagaagccgccggagccagtaaagtactcccttggtggtcaaattccggagggctaaatgtgtgtgtgcatgaatgatcacaaataaccctacctgcggtgttgttcatgtggatggtgacaagacctactgctggacagagtgagtgggacctctccgcagttccgtagctacctcatatggcttagggcggatcctgccgtgggatttatactggcacaccgacactaagaggggcctaattctcccttgggggagcagccagagagggcaacacaagtgggaagtgtgcaagggaccttgagagggggaaagggaggaaacaggtcaacctcccagagcagcaaggtaagacatccctgatttaagggattgagccttccagggcaggcaaagcgagacacccctggtttgaggggttgagtcttctgcaagtttcatgaacctcacacaaacctccagtagcaagaaaaatattcaggactccccttgcctttcttctcaggggaagaaagagtaactccactcctgccggtccctcccctagggaaaggggaaggagaggggagaacagcggcataagcggctggcagaggcagagaaagagagagtcaaagagagagacagagagagagagagagaaagagaggcagagagagagagaaagagaggcagagagagagagaaagaggcagagagagagagagagaaagagacagagagacaaaaagggagtcaaagagagagaaattgagagacagagtcagagagagagagagaagtagtaaagagaaaacagtgtaacctattcctttaaaagccagggtaaatttaaaacctgtaattaatgattgaaggtcttctccatgaccctataacactccaataccaccttgttgccagtgttaacaagggcatagcccaaaagcactgaggccactgacaacccgtagccttcctatcaaaaatccttaacccagtaacccacggatggcccatatgcattcaatctgtagtggcaactgctttgctaacagaagaaagtagaaaaataacttttaaaggaaacctcattgtgagcacacctcaccagttcagaactacctaagtcaaaaaagcataaaggtagcttactaactcaaaaatcttaaagttttgagattttagtaagttagtaagttttgtgatttttggggctattctattagaaaaagatgatttaacactagccactgaaaattcccttaacccagcaggtttcctaacaggggatctaaatcttaattaccatagaaagttcagatcacacctaggaggaactcccttcaggacaggatgatagatggttcctcccaggtgactgagggaaaaagacacgatggatattcagtaagtgataaggaaactcttgtagaagcagagttaggaaaattgcccagtagttggtctgctcaaacgtgggagctgtttgcactcagccaagccttaaagtacttacagaatcaggaaggagccatctatacaaattctaagttaacagggactgaacgaggtcttattaatagcaaagaataattgaaatcccaaacatacaaggttttcaacaaaagcaaagtttgctaaaagttaacagtgtaacatgtattatcctaacttctaatcttgtggccttagacacagacatgaagttcacttgggaaaagaatggttatcatatttgagaaaaaaaaggggggggggtagaatttatgtaaaaaggaatgttatggtaaattcttaaagtaaattaactggttgtttaaagaaagggatgttggcaacaagttagaaagttgaggcatgttgaagaattgtctgtgaaagtcgtgaaaaaatgttataaaagggaatttatgcaagaaatgtataatttaaaagtaattaggcctcctgaatgtaaaactattgaagaaagagtttgtgtgcaaggtatgtaaggaaagtagaatatacttttggtaaaaggattacaaggaggcataagaatgtggatttttacctacattaaaaggttaaaaaaatacattttgttttaaaggtttaagcaagttttgaaatgttaattgtaaaggaaattctgtgtgtaatcatactggctgaagttaaaggggtatcatccagtttttctgtgaactggacattaaaataaaagcacaacaggtttttcttaaagcactaacctgctctttaacaaaaattataaaaaggttaaaaagagtctgtaaaaatcttacattatgatcagacattaaaaattggataaatatgtctacaaggttttactaaaattaagtttaacattaataacacactaatataaagatgaaatttagcttatctggtataaaaatcatacaggaagcattgtcaaatacaaaatggtgtttggccttctttggtctaaaaactaataaaaataggtgccaaagaaaatttctcaacaagaaagcatgaaggactataaagtccactgttgatatccccacgtttaaaacaaaagatcaatttcttagaaattatatactcggtttatcctccaccttctcttcccttaaaacagaggtcttttagcacaggtgctgcctttggactttccagtgcctcagcatcagcctggggatcacgttctcatcaaagaggggaaagaagggaaactcgagccagcccgggaaggaccctaccttgtgctgctaaccactgagactgctgttcgtaaggttggaaagagatggacacatcacacatgagtcaagcaagcaccattatcctcagaatcatgggccattgttcctggatcaagccctaccaaattaaagctaaggaaagcttagtctatctatcttttcctttcccttccttacccagtgcttatatccattactattcctaccactagcaactctaaccccactttagaacgcttctgtggtttaggagcagaggtcactggaaaggatcctatgggcttctttaaggtgggctttgttctccctcctccacctcctatggctgcccctttcccaaacctacaaaatcaaactatgactcacctcatgccaaatgacaaaagcaaggtcccggtagtagaaataggagacctaaggcaaaccatagccattaaaacagggtataaaaatgtaaatgcctggttaaaattgattaaatattctgtccacacgttaaacaaaggcaatttttatgcttgtgcacatgacaggccagaagcccagattgtcccctttccactagggtggccctctagttgactgggcatggcctgcatggcagatctttcccaggattattcagcctggggtaacaagtcgtgccaagctctctctctgctacatcccgaagttcaacaccctgcgggtcagcccccaagggccatccagcttccatctcccaacactaagttcacttcgtgtctctcaggaccgggaggaaacttagcgttccttggagtcctgaagggatgcagtgagattaagaaatttcaagagcttaccaattagcccttactcatccctgagcagatgtgtagtggtattatgatggacctttactggacactctgccgagtaactgaagtggcacttgctttagtccagttggctatccctttcacgctggcatttcatcaaccagagaaaggaaaaataagatatcataaagcaaaagaagccccttatgggtcttttgactctcacatctatttagacataattacagtcccacagggaataccagatcaatttaaagcctgaaatcaaatagctgcaggatttgagtcaatattttggtgggtgacaataaaatgtaaattggataaactacatctattacaaccaacagccatccattaactacactagagatgctgttaaaggaatagctgagcaattaggggctactagccagatggcttgggaaaaataggatagccttagacatgatattagcagaaaaaggaagaatttgcatcataattaaaaatcaatgttgtaacttcatcccaaacaacaccgcccctaatggaagtataacaaaggcattgcaaggtctgactgctctatcctgagttagccaataactcgggggtaaatgacccctttacaggatggctggaaaagtggttcagtaaatggaaaagaatagtagccccaattcttacttccatcgcagccatcataggtgtgcttattcttgtcgggtgttgtgtcacactaaggaaggagaccgctacaactcctgctgccctcctcccaccaccttgcctagttcacaagacaggaggaaagagagaaagcaaaaagctggaaagaagcaaaagtaagataaatagccagacaaccttggcaccaccacctggccctaggagttaaaaaggtaataataataacatcaaccccagacctaaactacttgtgttatctgtaaattccagacattgtatgaaaaagcattgcaaaactttctgttctgttagctgatgcatgtagcctccagtcacgttccccacgcttgctggatttatcacgaccttttcatgtggacccctttagagttgtaagcctttaaaaaggccaagaattcagtttgcagggagctcagctcttaagatgcaagtctgccgatgctctcagccaagtaaacctcttccttctttaatccagtgtctgaggagttttgtctgcgttggtgcagaggtttataaaaacggcacttactaaaacctcccttaactatcctccaccttatccagagaagcttcttcttttggaaaatcaagcagaacaactaagccaagacatgttaaagaagtttgaagggaaagagctgtaaggaaatgcaagaggagagattgttagatatgagttctaaatttctcttcaaagaatcaatatgtcagtatgttccattctttgccttttacttgtaaacttcctcgtaacgcaaacattttcgattacctgctccatcctgactcattccgattacctgctctgccctgaattctgatttcctgctctgccataacaatttttcccgccaaatcactcaccctgtcactctctttaaattaaccaattggcattagtttagcctgtgcggtctaaccctaaccaataggggaacaacacagcagcagaggccacgtgcatcagggataagaaccccttctcccttgtccaagtgtgcgctcgccattgctccatctataagggcgcacccttctatagaagtacattgccttgctgagaattaaaaagaaaattttatattcgagtgctatgtcttttgcggcaccgaaactttatttataacaaaatctacaagggcttaacgataaagtcaaaattactgacaagctcagggaaaatgcagacttcagccccaggtggctacaatccctctttaatgaattccagtcttctttatggaattggttaacccctttaataagcaccctcttgctgttatgtcttgtattaataattggaccctgtatactcaatactataacttgaattgtttcctctcacctagaagcgatcaaactccaaatggtcccgcaaactgagccactcatggacaggcctttcttctgaggacctttaggttgaccccacaaggagccctcgctgctgttccccattcaacgccccttttcagcaggaagcagccagaaagagtcatcagccaaaacctcctaacagcagttagggtgacatctccacaggggggaatgttataggagttattaagaaattattttaggcagatagagaggaaaaggggtccttgggaagtttttgtttctttcttttaaagcagctgcataaatgtttcttgtctagcaggaaagcacaggctcttagagccaggccggcaacctttgatatgcaattgcaggccattagaaactgggtccacccaaacatggcgattcctgccctcttcttcttagtgcctcaatcactcattttggtcgttaccagaaaggaactcatatttagctggaatctatgccaggtaatgttacagagggtagtagtcagacatgaacagggcaggagaaggcccccacaccccaccaggaatgtcaggtgatggtccagcagttgtcccactgcctctctaaaataataactggtctgagccagcaccagggaaagacagtttcccaacagattaaaaaaacacctgaaactggtgattggcagcttcccgataagatctcaggaattgggtgagtgggctcaatcatgtgcattaagaggcaaaatagcagagtttaactggcatatgaccttccaggtacattccaccagaaaagggaagaacacctacctcaggtgagcatgcatacaactctagcaaacacactgcgcatgctcacctcccgagcctagcaggccaccgcgcatgcacgcagatcaccctcgccctaagggaagaatgaggggaagaggcaccagatgttggaagtatgccagcacctaaatccctaaatccaaggtcaagtggggcacttgtccttcaacttgcccagctgggcctcctccaagtgtactttcctttctttcattcccgttctaaagctttttaataatctttagcttctgctctgatacttgccttggtctcttattctgccttatgcccctcagtcaaattcttctgaggaggcaagaattcagggagggagggaaggagggaggaaagtgaaggcagggagggagggagggagggaggagggagggaggatggaaggaaggaagggaggaagggagggagggagggagggggcaagtgaagggaggaagggaggaaagtgaagggaggaaggaaggaaggaaggagaagggaagaaggaaaggaaggaaggaaggatacatccttgaataaggatcaatgaggaccaaagccccaaaatgacaaatgtcccataggacagggtggggtagcatttctaatgtgatgctagcctgcgttccatcaaaaatgggtttactggccgggtgcagtggctcacacctgtaatcccagcactttgggaggccgaggcaggtggatcacttgaggtcaggagttcgacaccaacctggccaacatgttgaaaccccaactctcctaaaaatacaaaacattagctgggtgtggtggtaggcgcctgtaatcccagctactcgggaggctgaaacaggagaatcacctgaacccacgaggcagaggttgcagtgagttgagatagtgccattgcacttcagcctgggcaacaagagtgaaactctgtctcaaaaaaaaaaaaaaaaagtttacaaatcccatcgtaacctgaaggcaattgctttgagatctgttcacaagagccatagatttatcatgtaacttaacttcatttggtacaaactttgttttttttttggagttggccccatttgggaaaatcagaatgtagatctggaatttaaatattgcctacaaagctaaacagacaaaatgcagttgttgcttacctgaaacaaatgtttgcggcatctaaggactgataggctgggacagaattaagatagtgttaggaaagggtcccctaaggttgggtcgagttgccctttcataggaagaagagaggcctgggaaaactttctaaccaggaaggtagacattaatgtccatagttaacattagtcaatgattatttactaggtatgctctttttagagacgtttatgtacactctcgtttagtcttagtacagctcataatgagctggtactattataaccctcattttacagaggaggaaacagccttcacatgtgtacagaaatcagtgaagcctgcctatcacccatacttgctgggttcaacatgaacggcacaggcaaggagaaagccctgtgaccagcggtaccagaaagagtgaaagggcgccatctagtgactgtcatggtggttggcagtagaggttggaagccggtggttttttttcgtgggttttttttgctgttgttttggggttgtttttctgtgtgagacagagttttgctcttgttgcccaggctggagcgcaactgcggactaccaatttcagttgtttctatctactgggaaacggccgctccctggtgccagctgcaaccaattatcattttagcgaggcaggatgacaacctccggcccatcacgtgatggtcgcctgacatttctggtgtgtggggggagctgtctcctgccctgctcatgccccactagctacctactgtaacattctcgggtatctggaatacagtactaagcatcttaaaaaaaacttcactggcggccgggcacagtggctcatgcctgtaatcccaacactttgggagaccaaggcagacggatcacgaggtgaggagttagagaccagcctggccaacatggtgaaaaccccatctctactaaaagtaccaaaatgagccggccatggtggcgtgcgcctgtagtcccagctactcaggaggctgaggcaggagaatcacttgaacctgggaggcagaggttgcagtgagccgagattgcaccattgcactccagcctgggcaactaacagtgaaactctgactcaaaaaaaaacaaaaaacaaaaaacaaccccccccccccccccacacacacacacacacacacacgcagaggcaaaatggcggggggtaaccttctagggggtcattccaccggaaacgggaagaacgactcaggtgagcatgcctgcagctccagtaaacacacgtaactccggtaaacatgcttgcctcccaagcacaatcaggtcactgcgcatgcgggtggctcaccctaagggaagaatgaagggaaaggggtgcaagacgccggaagcagggcagcatgtaaaatcctaggtccaaggtcaaacggagcacttgacctccaaggtgcccccttaagcctcttccaagtgtactttcctttctttcattcctgctctaaatctttttcatcaatttccactccgctgtaaaacttgcctcggtctcttttcctgccttatgacaatctatttttttcttctgaggaaggaagagttgaggctgctgcagacctgtacagattcgctgccggtctctcagataacttccactactagcaagaaagcaaacacaccacatcaatgaaccaccaccatgtagcttaagagctgtaaactttcacttttacttttttttttttttttttttgagatggagtctccctctgtcacccaggctggagtgcaattgtgcaatcttggctcactgcaacctccacctccggggttcaagcagttctcctgcctcaccctcctgagtagctgggatgacaggcatgtgccaccacacctggccaactttttgtagagatggggctttgccatgttggccaggctgatctcaaacgcccagcctcaagtgatccacccacctcagcctcccaaagtgctgggattacaggcatgagccaccgtgcctggccaattcttcactttttcaagtaaatatatgcacactgattaaaaacccaaatgaacgaaagctagatacagtgggaagtcagcctccacatcccccagctacccagtcctccccagaagcaactgctgttaccagcttcccatgtccccttccagagacagtctaagtaagcaaatactttgatacaaataatagcataccacggtagccggaataaagcctcctcaccaaggtgtccgtgtcctaatgcctgggatcagtaaatatgtgatacggcaatagggacggggcagctgattcaagttaaaggccttgagaaggcagattatccaggtgggccctatgtaatcaaacaaatccttaaagctgagaaccttcccaggctgtagtcagaagaagatgtgactttggggttagagagacgcaaagttgctggtactgaagatggaggaagccacgtaatgcaggtgacaaaaacactgattctctccttagccccctggaaaggcgtgcagccctgctggcgccttgatcccaggcaggtgaggcctgtgtcagacttcctaccccaaaatcagaaggtaataagtttgtgtcttaagcccctaaatttgagaacatttgctacagcaacaatagaaaactaataaatacactagtacccttttctttccttctttcttcctttcctttttttttttttttttgacggagactcactctgtcacccaggctggagtgcagtgacgtgatctcggctcactgcaatctctgcctcccctgttcaacctgttcaagcaattctcctgcctcagactcccaagtagctaggattacagatgcacagcaccacacctggattttttttttttttttttttttttttgtatttttagtagagacatggtttcaccacattggccaggctggtccggaactcctgacctcaagtgatccacccacctcagcctccactgcacccagcatcatcttcttcttctttttttttttttttcaagataaggtcttgctttgttgcccagactgagtgcagtggtgcaataatggcttacagcagccttaaactctgtggctcaagcgaccctcctgcctcagccccgggagtagctgggaccacagatatgcaccaccaccctcagctaatttttaaaaattttttgtagagatggggtctatgttgccaaggctggtcttaaacttctggccttaagcaatcctcccacctcaggctcccaaagttctaggattagaggcatgggccaccgtgtcccacctcctttcctcacttaatacattttgaagcctcttcccttttacaatatttagagctgcctcattctttttaatggctgcatagcatctcatcatatgagtatttaatcgttctattaaggatggtcacggggctatttgagacatataaataagttacaaataagtctgtaatgtcatacttcccaattattctcatctcatagcacacacaaatatattaatatttatataacacactgaagtgaattgaaggtactgaggtcatttaccttggaccttgatggaaaatgttactaataatactttctttttctttcttttttttttttaaatgagacaagttctcattctattgcccaggctggaatgcagtggcatgatcacggctcactgcagcttcagcctcccaagtacctgggaccattggtgcacaccaccacacctggctaattttttatttttagtagagacgaggtcttacatgttacccaggctggtctggaactcctaggctcaagcgatcttctcacctcagccttccaaagtgctgggattacaagcgtgagccaccatgactggcctatattctttatattatatagttttgttagttttttcagacaggctttctctctgtcaccaaggctggagtgcagtgaaatgatctcagctcactgcagcctccacctcctgggctcaagctatcctcctgcctcagcctcccaagtagctgggaccataggcaagcactaccacacttggctaatttttgtattcttttggtagagtcagggtttcaccatgttacccaggctggtctcaaactcctagactgaagcaatccacctgcctcggcctcccaaagtgctaggattacaagtgtaagccaccacacccgacatacagttattaaacacacaaacacacatacaggagaagatattgacattgaatttatataaaacttttttttaactgagggtcccactctgtcacccaggctggagtacagtggcgtgatcctagctcattgcaccctcaaactctagggctcaagggatcctcccacctcagcctctcaagtagctaggactacaggtgtgcaccaccacgcccatgtaattttattttatttttttagagttagagtctcttattactgcccagactggtctcaaactcctgggttcaagcaatcctcctacttcaacttcccaaagtgttgggattacaagcatgagctaccatacctggcctatacaaaacttctaagtctttaatttttttgaagaagttgattttttttatttataatatcaggctttatattatttaatattttaaatatcaggctttatgcctgaaatagctgattctcattattcaccacagttatgttctataaagtcattgcaaacactgaatctgttaatactaaattattgttcctagtggaaatacagggttaagttcctatgagcctctggccacatttttataaactgaaatgccacttgtggtacaggttcatttgccaacttccttgcataacaaaccagtttcattagcattgaaaacctgttcttccacaggactcttttaaaatatcactcagcaggtattttaaaaattcttccagatctgcagaacatgcctcacctgcaacttgatgtttttcactccatgtcaccttctgaaacacgcttgctgaccagcagtggctgagaagggtttaacaatgttctaatcctgtatcatgtgactggaagtttcttgggctttcagcttcacagtgctgtctgctatgtttggttggttttgttaaatgggtcgtcatctcaggaatccacaaatgtagccacttctccatagcttcatcacagattggcagtcttcttcctttttctggatggactgtattgttaactcattcatgctgagctcacagccaacagcactacaactcatgcctgaatcgaagcctatcaaaggcccatcccagccttcctgtgccaaggaatgctggacaacacttcagcattctgcatggggccattttgaacaggcacagtggctcacacctataatcccaacactttgggaagccaaggtgggcagatcacttgaggtcaggagtttgacaccagcctggccaacatggtgaaaccccatctctactaaaaatacaaaaattagctgggcgtagtggtgcgcacctgtaatcccagctactagggaagctgaggcaggagaattgcttgaaccccagagtgcagtggttgcagtgagccgagattgcaccactgcactccagcctgggtcacagagcaagactctgtcttaaccaaaaaaaaaaatcaccaccaagaggcacaaaaatgtgaaaaatgtggcactaagaccacaaaaaggacactgatttacaatatcagagcaaaacaagaaggcagggtgtccccttgtttgacttcatctgcgaacgtgcgtgttaggtgataaaaatttttgccactctgtgcgtacctgcaaacagctgcaaaagtgccaggagcactgattttggagttacgagtaaattttagtgagtagttgaattcacaaaatggagttcatgaataatgaggactctctagatgcaattcctgatcaagataactttttaaagatgatcgcttccttttttttttttttttttttttagtgttaccattgattagaaaatgtgtttgcaggccgggcatggtggctcacgcctgtaatcccagcactttgggaggctgaggcaggcagatcacaaggtcaggagatcgagaccatcctggctaacacggtgaaaccccgtctctactataaataacaaaaaattagccgagcatggcggcaggtgcctgtagtcccagctacttgggaggccgaggcaggagaatggcgtgaacccccgggaggcgaagcttgcagtgagccaagatcacgccactgcactccagcctgggtgacagaacgagactccatctcaaaaaaaaaaaaaaaaaaaaaagggaaatgtgtttgctcaagtaggtgggaacaaacaggagactgtttatccctattttttaaacattttctgttcttgccattaactagatttcagataatttaatctatttaattcatagttctaagcaatagtctagtctttaaatctaatagcttttcttttcattcacaaattgacattgtcctgtgatattgtcaatgaattctgagtccagtcaaacttttccatttcaaatcatcactaaccaaaagaagcagaatttcagctacaaatgcaatcacatgtcatttcaaattttgtagtagcacattgcagtaaaaaagaaacatgtgaaactaacattttaacatttaatttcacccaacacgaaatatcattggaaaatgatgtgtgttttgcagtatgatcagcgtgaaaaatattagtgaggtacttaacaattttctgtactaagtctttgaaagtttctgttgatggcaacatctcattcaggctggtaacattaacattaagtgctcactagccacaatgttactacctcattgaacagtatttcaaaaataacactcaagccattcctcaagtacacgtaaatattattctagtaactataattttttagaattaaatttatattaataatgctgactagtagctactagtaaaaaattcctaaactcacttttccaaagttaaatttttgctttaaaagcatacactttttcaatacacatttgtatctgtacatacatatgagatattttcacatgatccatgcagtattcttttctttctttccttctttcttttattttctttcttgttttttgtttctgtttttatttttttggagtcagggtctaactcccatagcccaggctggagtgcagtggtatgacatgatcttggctcactgcaacccccacctgccaggctcaagtgatcctcccacctcagcctcccaagtagctgggactataggcgtgcaccactgcacctggctaatttttgtctttttaaaagagatggagttttgccatgttgcccagactggtctggaactcctgggctcaagctatctgcctgcctcagcctctcaaagtgttgggattacagacatgagccactgtgcttggcaatattaattttaaaaaaattttttagagacatagtctcactctgtcacccaggctagaatgcagtagtgtgatgataggtcacttgcagcctcaagctcctgggctcaagggattctcctgcttcagcctcctaagtaggtaggactacaggtgcacaccaccacacctggctaatttttttaatgttttgtggagatggctaatttttaaaattttttgtgaagatggagtctcactgtgatgcccaggatggtctcagactcctggcctcaagtcatcctcccgcctcagcctcacaaagtgctgggattacaggtgtgagccaccacgctccgcctccctaatctttactgtattacctactgggcaatgtaagtgattttttgactgccagtctagggagtcagatgactgcccagcttgtggtggccggcctccaagaccatcccatgatccctgccttctgttcttcagaccctgtgtaggcccttcccacactggatcagacttgctctgtgtgaccagcagacatggggaaggaatggtagaagaaactaggtcataaaagacagtttggctttcatcttccccctctcttggttcactcactctggaggaagccagctgcagtgtcttgaggccacccaaggagaggccctcttggctaagagctgaggcctccagccaccagctttctgtccccagatgaccgcagccccagctgacagcaagatggctcacgagaggccccgaggcggaactacccagccaagctactctcattcctgatctacagaaactgagaaaataaatgttttaagccaacaaagtttgaagtaacttgttatgtagcaataagttactaacatacagacttaactttaaaagttatatttagttgggcacagtggctcatgcctgtaatcccagcactttgggaggctgatgtgggcagatcacctgaggtcaggggttcgagaccaacctggccaacatgggaaaccccatctctactaaaaatacaaaaattagccaggcgtggtggcaggtgcctgtagtcccagctacttgggaagctgaggcggaagaattgcttgaatccaggagggggaggttgcagtgagtggagatgacaccacttcactccagcctgggcgacagaatgagactccgtctaaaaataataataataatgttatatttagatataaagaatttaagggactaaagagtttccacagttttttttcaaacttttgaaatttgatatttcaaaaaataaatcttggccaggcacagtggctcatgcctgtaatcccagcgttttgggaggctgaggttagcagatcacttgaggtcaggagatcgagaccagcctgggtaacatggcgaaaccccatctctacaaaaaatacaaaacactagccgagtattgtggtgcatgcctgtagtcccagcaacttggagagagacaggaggttgaggccacagtgagccatgatcatgccactgcactccagcctgggtgacagggtgagaccctgaatcaattaatccatcttacatcagccacttcttaggaatgctttaaaccaactcaacctttttagattaagcatagatgagcgaaatacaatatggaaatattagttttacttaaaattctgaaaaagcaacaaaatattatattcatgtagagtcaattgtgaaaaaaactgattcctgaagccacaaagtctacacctttattgtatcaactttatgttcaattaatatttttaagaatatttctatgattaaaaattaattataaatcctatcaagaatcaaacttactaaatgttaactttaaaagccagtaagatctacaacacagatgaaccttgaaacatactaagagaggctggttgtggtcgctcatgtctgtaatcccaggactttgggaggctgaggtgggcagatcactggagcccaggagtttgaaaccagcctggctaacatggtgcaaccttgtgtctacaaaaaaatacaaaaaatgagcagggcatggtggtgcacccctgtagtcccacgtacacagaagactgaggtaggaggatcacttgagcccagggaggtcaagactgcagtgagctatgattgcaccactgggctccagcctgagcaacagagcgagaccttgtctcaaaaaagaaaaaaaaaaaaaaaacccactacgtgaaagtcagtcacaaagggccacatcttactgtttcatttatctgaaatgtctagaattggtaagtctatataaatggaaaacaggttagtggctgcctagggatgaaggcatggaaggaaatggggaatgactgctaatggctatggggtttgttttaggggtgatgaaaatgtcccaaaatagtggtaatggttgtataattctgtgaacatactatcaatcattgaattgtatactttaaatgggatttaattcacattacatctcaataaaactattttttaaagaagaaaatgttcaaggaacaagggttgctaaataacagaggataactgttgtttgacaacagcacaaaaattatttcccaaaaagtgtaatggccctggaaaatgagtgcaacgggatcttctcttgaacctggatagcggggtgtggacagctgggcacactgaaggcggtgatacagaactaaaagcaacaggacagctatgaagggaaaagaaaatcagtgtggctaccaagacattttagtgtctgctttcaagaaggtcctccccccatgcttggctcatgatatggggtgagtctcttgttagagtggaacatataggtcagtgtaaagtgtggagaccagcacctgactctgagcaagagttccatgaatattagctttctatttttaaaaacccactaaaagtctgggcacagtggctcatgcctataatctcagcactttgggaggctgtagtgggtaggatcgtttgagcccaggaatttgagaccagcctgagcaacacagtgagaacccatgtctaccaaaaatttagccaggcttggtggtgcacacctgtagtcccaactgctcaggaagcttgaacccaagaggttgaagctgcagtgagccgagatcacgccactgcattccagcctggccaacagagggagcctgtctcaaaaaaataaataaataaataaataaataaataaataaataaataataaaaaaatatgaagccactaacaaaggagggtaggaaatagttaacaatccagttatattctctttagagacacgcaataccagataacaaaaacaataaagatggctatcttagtcccttttctgttgctataactgaatgcctgagactgggtaaattgtaaagaaaatacattcatttcttacggtctggaggctggaagttcaaggtcaaggagctgcatctggtgagggccttcttgctagtggggactctctgcagagttccaaggtggtacagggtcacatggcaaggagtacacaagagaatgccaagtggcttttataacagactcagttttaaaataactaacccattcccatgataacccattaatccattaacccattaatccatgatatattaatcctttggtgaggacagagcactaatgacccaatcacctcgtacaggctccacctgtcaatattgttacatttgggattaagtttcatcatgagtttcagaggggagaagcattcaaaccatagcaaactcctatgatggtagaaaaataaatataagagcaaactgtaccaaaaggaaactaagctttatatatgcttctatagtttgaattatgtgtcctcccaaaatttatatgttgaaacctaatcaccaagatgatggtattagaaagtggagcttttggggaggtgattgggtcatgagggctctgtcctcacaaatgggattaatgaccttataaaagatatataagggagctgcttccctcctttttgcccttccaccatgtgaagacaaagcgtccatcccctctggagggcaaaacaacaaggcatcatcttggaagcacagaccaggccctcactagacttcctagaaccttgaccttggactttctagtctccagaaccacaagaagtaaatttctattgtttataaattacccagtctcatgtattttgttatagcagcacaaatggactaagacatgcaggcaagaatttatgataggccgggcacggtggctcatgcctgtaattccagcactttaggaggccggggtgggaggatcatctgagatcaggagtttgagaccagcctggccaacatggcgaaatcccatctctactaaaaaacatatatatatacaaaaattagccaggtgtggtggtgcacacttgtaatcttagctactcaggaggctaagacaggagaattgcagaattcttctgcaattcaggaagcagaggttgcagtgagctgagatcgtgccactgtactccagcctgggcaacagagcaagactccatctcaaaaaagaatttatgataaacaagtcaggctatccagatgcaagggctcatgcctgtaattccaggactttaggaggccaaggtaggaggattgctctagcccaggagttcaagaccaccttgggcaacatagcaagaccccacctcttaaaaacatatataaaaataaaaaattgtccaggcatggtggcacagacctgtagtctcagctacaaaggatcgcttgagcctgggaggtcaaggctgcagtgagccattatcatgccactgcattccatcctgggcaacagagcaagacactgtctcaaaaaagaaaaaaaaaattcaggctaaataatatattagaccagttgaaagggatcaatagaaacattaaagaaagattctatagtgggttagttctgcagtgtcccctcaaaattcatgtccacctgccatctcagaatgtgcccttttggtaatagggtctttacagatgtaattagttaagatgagattatgctggaagactaatgtccttataagaagaggagaagggtcaggcatggtggcttatgcctgtaatcccagcactttgggaggctgaggcgggtggatcacttgaggtcaggagttcgagaccagcctggccaacatggtgaaaccgtgtctctactaaaaatacacaaattagctaggtgtagtggcaggcgcctgtaatcctggctactcgggaggctgaggcttgagaatcgcttgaacacaggagacggaggttgcagtgagccaagatcatgccactgcactccagcctaggcgacagagtgagactgtctcaggaaaaaaaattaaaaaaaaaaggaacaggagaggagaagacatacacagatgctcagcagagacagcagccatatgaagacagaggcagacattggtgtgatgctgccccaagacaaggaatgccaaagattgctagcaaccaccagcaagtggaagaggcagggaaggattctttcccagcgcttggagagagagcatggtcctgacaacattttgatctcggacttctggcttccagaactatgagagaatgaagctctgcacctgtatttggtgtttagttatggtgaccgcaggaaactgatacatatgccatgtagtgcagccactcaaccacaaggggcactgtctggcagcaagttctacaaacacaaactgtccaaaataatcactgaagttcacagagaaagccatacaaatagcattcaaatatttttaacgatgatcaacaggctacaatttatcatttttaaaaacataaaaccattatcatcttgctgaataattcatgacctttgtaacaaactggctgagaaccacttttaaagaacatcctggtccggctatcattacacacacgggagggtatctgtaggataaattcccccaacaattccctttccaggaagagacgcatatttttaatttcaatagacaacagccaaattgccctccaaagaggaggtacattacactcgccagaaatatacatgaatggctggttttccccaggcttggcaatactttgccaagctaagaggtaagaatgggctttaaaataaaccctgatccagctcccaaggagaggactggggccttcggacccacatttcccagcacaggtgcttcaccagcctgccatggccccttctctgtccagtttagcaagggtgtggcagatttcctttcaggcacagagcccagccttccagacatcacacttaaactggttcctaccacatttgcaaggagaatctcttcttccaagtcagcagtgtttacaataagcagtatgcttttccctgagtcactctgaatatagagaccagaaaccaattccagggtagcaaagggacagccaccatggtgacctcaagcatacaaatcacacacctgcttgtcctgcctggtcaagccctgttgggaccatgcataatcctgaccccagcactcaggcacagaacacttaggagaggaaggcgaggtttcagctacatgaggtggcattgtaggaattgtcttctccctgacaccccccatggcactcaacagcctcactgtcctgaccctaagccactttgtgacccacccctgggaagggcaggcagtgaagaactaggcatagagaagaggaggtggggagttaccaagctgtttgctgacctcttcatttgactcagaacctgaccttaatcttgcttccagaaaaacaatgggccccattcctgcccaagcttgccttctgcaacccagactttcttagaacgcgatgggagtcaagagcgctttctttaaggcgaagctgtagacaggttcccctcacctcccacctctgcccacattatctgcctctagcaaataatggtagtcatgactgtgcctgttacccaggagaacaccaatcaatggctgtaaagacatgaatgtatggttttagatggtgtctgcctgcctttgctgaaaaaatgtaagaacagcaaacatttatgtattaccgtttgtcagtactgctctaagcacttttataatattaaacattcatgctgtactccttacagcaatcgtaagagctaggcactaaaactattcccattgtacagatgagcaaactgagacactgagagattgggaaccttgcccacgatcacacagtgagtaagtaggagctacaataaggagccatgaaggcagggagctccactcctgcccttcccaggcctctgttcactcctgagcatgactggtacctaacaggtgctcagacagtcgctggatgcagatgagggaacggctgtggacattcagtccttcagaccacaaaaggactttggaaggagaagaaccctggaagaatgccatgttactggcaaaggtttgggttcttacccagtgatttggtaaacacaaagggacaatggcattaagtgatagcaaagccaatctaaacagaatcacagcagtaaaccaccagaacccacaactttttttttttttttttttttgagacagagttttgctcttgttgcccacgctggaatgcaatggcgccatctcggctcgccacaacctccacctcccgggctcacccaatcctcccagctggaactaccgcacacaccaccacacccagctaatttttgtatttttggtagagacagggtttcactatgttgcccaggctggactcaagctacccacctacctcagcctcccaaagtgctagaattacaggcatgagccaccatgcctggccaccagtattttgccaggctggagtgcagtggcacaatctcggctcactgcaacctccgcctcccgagttcaagcaattcttctgcctcagcctccctgagtagctgggactacaggcacgcaccaccacacccagctgatttttgtatttgtagtagagatgaggtttcagcatgttggccagattgttctcaatctcttgaccttgtgatccaccctcctcagcctgttgggattacaggcacgagccactgagcccggcccagtctttttcttaaaaaatctgctcacaattccaattatttgcgcaatgctgtactaagtacaagagaaaggtgtttcctctcagccaggacagaaggtaggaatcttcctgtaactgcagtcctttctatggccactaaaacaaattaccacaaactgaggggcgtgagataacacatgtttatgatcttatcattctggaggttagaagtcctaaagtcaaggtatcagagccgtgctccttccagaatccctgagggaggaacccctctgctgtcctgtcaacttctggaggctgtctgtgttccttggcacatgcccttcctccatctccaaatctctcctgacctctgcttctaccacatcttcgtcttggacccttctgcctccctctcataaagacccttgggtctacactggacccaccttggtaacccaggctaatctccccacatcaagatccgtaatcacttctgcaaagtccctcttgtgaaggaaagcaaattcacaggctctgcagattctaatgcagacctcttgggggaggggcattattctgtcgacggcaataaccggagccatttctttctttctttctttctttttcttttttttttttttgagacaaagtctcactctattgccaggctccagtgctgtggtgtgatcttggctcactgcaacctccaccccctgggttcaagcaattctcctgcctcagcctcctgagtagctgagactacagatggacgccaccacacctggtttttttttgttttgttttgttttgtttttttgtttttgagacagagtctcactctgtctctgtcacccaggctggaatgcagtggcctgatctcagctcactgcaagctctgcctcccaggttcacaccattctcctgcctcagccctcccgagtagctgggactacaggcgaccgccaccatgcccggccagttattttttcgtatttttagtagagatagggtttcaccgtgttagccaggatagtcttgaactcctggtttcaagtgatctgcctgccttggcctcccaaaatgctgggattacaggtatgagccacaggaaaaaaaaatcactttcccaatctgcaaaatggctactgtcctcaatttccccaaactaatccctctcaatgatgacctcaaatctctcaccctccaaagagataacagatgccctcaggaaggccttagtttccccaacatgcttgggtctaaacccacacactctgcctttccttctgttacaagagaagaggtgtgctgtttccccctccacacccccacctgattcctggatccacccgtgcttggtcttcccacacattttgttcttgcaattcttcctgttcttcaactgttctctctctgagattattgtcattacataaaaacatgctttaatatctctctcggcttttgaaattctttaaaaaggagttaagttgtgcaatgtgagttcattgaccacaatggatttaagttagaaatcaatcgcaagatagccggaaaaatccccaagtaagttggaaacttaaaaaatacacttctagccaggggcagtggctcacgcctgtaatcccagcattttggaaggccaaggcaggcagagtgcttgaggtcaggacttcgagaccagcctggtcaacatggtgaaaccccatctctactaaaaatacaaaaattagctgggcttggtggcgggtgcatcccagttactcaggaggctgaggcacaagaatcgcttaaatccaggaggtggaggctgcagtgaactgagatggcaccactacattccagcctcagtgatagagcaagactctgtctcaaaaaataaataaataagaataaaaataaaaataggcggccgggctggagggccctgccaggggtgggggtgggggtgggtgcggggagccccgcggcgggggcgggcgcggagtcacgggggtggggtcactcgcggtggctcggggaggccagctgggaggggagggggccgtgggggcggctcggctgaaccagccccggctgggcagcagcggggacgccgggggccggggccagggctttccgggcttaggtgaggccgccgtgggccccatcttccggcggtcgccggagtttgtggtgattgttgctgccgccgccacccccccggctgccatctcctcctcctgggccgccgcctcctcctcttcctcctcctcctgggccgggctgatcccctccccgctgccgcctcctcctgggctgggcccgcggtgtctcgtcccctcgcggagccgctcctgccgccgccgccgccgcctcctcattcatcctcgtgcaccataggcggcacaggcaccaagatgtccaaccgagtggtctgccgagaagccagtcacgccgggagctggtacacagcctcaggaccgcagctgaatgcacagctagaaggttggctttcacaagtacagtctacaaaaagacctgctagagccattattgccccccatgcaggatatacgtactgtgggtcttgtgctgcccatgcttataaacaagtggatccgtctattacccggagaattttcatccttgggccttctcatcatgtgcccctctctcgatgtgcactttccagtgtggatatatataggacacccctgtatgaccttcgtattgaccaaaagatttacggagaactatggaagacaggaatgtttgaacgcatgtctctgcagacagatgaagatgaacgcagtattgaaatgcatttgccttatacagctaaagccatggaaagccataaggatgagtttaccattattcctttactggttggagctctgagtcaaaagaacaggaattcggaacttttcagtaaatatctagcggatcctagtaatctctttgtggtttcttctgatttctgccattggggtcaaaggttccgtcacagttactatgatgaatcccagggggagatttgtagatccattgaacatctagataaaatgggtatgagtattatagaacaattagaccctgtatcttttagcaattacttgaagaaataccataatactatatgtggaagacatcccattggggtgttattaaatgctatcacagagctccagaagaatggaatgaatatgagtttttcgtttttgaattatgcccagtcgagccagtgtagaaactggcaagacagttcagtgagttatgcagctggagcactcacggtccactgaagctctgaatcctcagggatgccacctgcacattctcatactctgtccgggctcccagcctagcctttaccacgatactggtcctggtttggggggattctgaaacctcaaactaatagaactttcttctctttttttctagtaggtgtagtccttccttaatttcaactcattaaaaaatgctttatagtttagggcagtggaaggaaggctggcatcaaaatattttgatcaaaaaagatgacaatgtaaaggctcagttatggcagacagttttttgaaagtaacttgtaaagcatttaccatatcctaaatttgcactctttgcagacttgtgcacatatattccgctttcagaatagttttgcaaattgtacacaaacaaacaaaaaggtggaagctttttaataaagaaattgcatttataaatgatctgtattagaatataataaatctccagttatagtcaattactacccatgttgtacaacagataccttctattttagttgctaataaagggctacacaactcaaaataaataaataaataaataatttaaaaaataaataaaaataaactgaatgaaattgaaaacatatcaatgtgagatgccactaaagtcatactaaaagggaatttacaccacttactgcctacattagaaaagaagtctcaaatcaatgcaaatcaatgacttctgcctttacagtaagaaaccagaaaaagagcaaataaaatccagtaagcagaagaaaggaaacaaagatcagaacagaaattaatataatcaggaaaagagagagagagagaatcattgtaaccagaagtttgaggaaaatcaaatcaattggtaaacctctagccagacagatcagaaaaaaacacgaaagacacaaaccagtctcagaaatgacaggtagcatcattaccaacattaaaaggataagggcatgttaaaaggataagggtatcaatagaatcaacaccttagatgaaatatataaaaaatttgagctctttctcagtgaccagggcctgtgcttaggcatagacgggcaagtggagccaacatgccagcggcccagagctgggtttgttgccaaacttatgtgaccctgcagagacccttcgagaaacctcatctcgaccaaaagctaaagctgattggtgagtatgggctccagaacaaatgtgaggtctggagggtcaaatttaccctggtcaagatccataaggccgcccgggagctgctgacgcttgatgagaaggacccacggcgtctgttcgaaggcattgccctgctgcagtggctggtccgcactggggtgctggatgagggcaagatgaagctggattacatcctgggcctgaagatcaatgatttcttagagattcctacagacccaggtcttcaagcttggcttggctaagtccatccgccacgctcatgtgctgattcaacagtgtcatatccgtgtccgtgagcaggtggtaaatatcctgttcttcactgtccgcctggattcccagaagcacattgacttctccctctgcttccctattggggtggccaaccccagccacgtgaagaggaagaatgccagcaagggccagggtggggctggagccagagatgacgaggaggaggaataagcctgcttgtcccctcctgggctggtggattgtctagttttcctgccaaatgataaaacaggatcaatgctttatttaaaaaaataaaattatgaaaaacagaaattaaggtcactcaagaagaactaggccaggcacggtgacacaagcctgtaataccagcactttgagaggccaaggagggagaatcgatgtagcccaggagttcaaccagtctgagcaacacagtgagactcccatctctaaaaacaaataaaaataaaataaaataaaaaattatccaggcaggccgggtgtggtggctcacgcctgtaatcccagcactttgggaggccaaggcgggtggatcacgaggtcaggagttcgagaccagcctggccaacatggtgaaaccctgtatctactaaaaatacaaaaattagctgggtgtagtggcagcgcctgtaatcccagctactcaggagcctgaggcaggagaatcgttggaacccaggattcggaggttgcagtgagccaagatcgtgccactgcactccagcctgggtgacagagcaaaactccgtctcaaaaaaaaaaaaaaaaaaaaaattatccaggcatgactgtggcacacttgtagtcccagctactagggaggctaaaggggaggatcacctgagctcaggagactgacgctacagtgagccacgactgcagcactgcactccagcctgggcgacagagaagaccctattaaaaaaaaaaaaaaaaaaaaaaaaaacagaaatagaaagcctaaatagccccatatccttaaaacaaggttccaaatgatctttttttttttttttgaaaagtctcactctgttgcacaggttggagtgcagtggtgcaatctcggtttactgcaacctccgcctcccgggttcaagcagttctcctgcctcagcctcctaagtagctgggattacaggcacgtgccaccacacccaggtaatttttgtatttttagtagagatgggggtttcaccatgttggtcaggctggtcttgaactcctgaccgcgtaatccacccgcctcagcctcccaaagtgctgggattacaggtgtgagccaccgcgcccggaccaaatgatctttaggagaaaaaagaaggaaatactgggggaggcacagtaggagatcacagcaggggcccacctccggaacctcaagtaaggacttgagagagaaggtagagtcagagtaacagagacacaggcgggttagccagctctgcatggaaaaggctgagtcgtgatgatgtcatggttctccccaaatctcaaagtcactgatcaaacaactcagtttacactgaagacgatggatgagactctaattttgtgcccacagcttgacacacctttgggaatttggtttaactttctttgccggtacacagatctgtgagaacatatgatcaatccagatctttatagatctatatcctccctggacaaacctaaatgcagacacttttagcacccgtaggagttaggtaggattaaataaaaacattccctcccacttgggggcacattcactgggaatcccagagcgatgtcgcctgcccacacctgctaagtgcgctcacagggcatctagttccctctcttgagttccttttaagcaagcaaggcaacctatgtccagagaagcagttactgtgtctaagtaagtcactgcatcttaggaaaaagcaaacattcgcattttgcagtgcatgatgggcgcacacccaagaaaattactcagcacttgtttttctcactttggggttttcccaaaataatttcttcagtccagttgccaagaatctggagcccccgactgacccatcaaggtccgatttggcttcggacacctcgcagatcaccccgcggctcagagcccggatcctgaagggcgcagcgtgggcagggggcgggcccgggagttggaacagagggcacagacggcccctcctcggaggggagggaccggagccggggcctttttctttaagactcgcagcactggatcccagaacttagtctgcgcggcggcattgacactagctgggctcctcggggcgcgccccaggtggtccgaagcccggtccgccctccacgcaggtgccccgcgctccccgctcagccatgtcgtcctgcagccgcgtggcgctggtgaccggggccaacaggggcatcggcttggccatcgcgcgcgaactgtgccgacagttctctggggatgtggtgctcaccgcgcgggacgtggcgcggggccaggcggccgtgcagcagctgcaggcggagggcctgagcccgcgcttccaccaactggacatcgacgacttgcagagcatccgcgccctgcgcgacttcctgcgcaaggagtacggggggctcaacgtactggtcaacaacgcggccgtcgccttcaagagtaggtgcagggcttgggttggggccccctggagcgctccgagggtgcggaggtggccagccgcaggctccccacccgtccacttgagtgaccgaggagggtggcgccgacccctagggatgcgctcagcccacgcctcccgcgaggcggttttcgctttccgtgattcgctgagccccaggcgggcccgggcgacaaacagcgcgccccgcccgccggcctgtgagggcctgtgcgcggcccggggccctccccgaactgtcagccgctgttgtgtgcaggaaaactggcctcctgggagggggcaacgccctgctagagttcatcagctttccttccaacgcgagaaacattttctctgcaaagaaacggtctccgctcgctttgggctttcgctttccttgaaagggcgcattcatagatgcccggaggcatttgctcgggaaaggaaatgaatcgctaaaacaggattagcgcgcgcttgcccttggtggacttgacaatttgtgtaatgcagagctttgataggctctggcaaaaaggaagcgagccttctcgttcccccacccccgcccggggagcttatgtttgttataaaatacgtgcgtgtggtcttaaaagcatcttccttaaggagaggggcggggatcaagagattgcttattctaactactactgaagaaaattacaggagggcgcagtggctcacgcctgtaatgccagcactttgggaggccgaggcaggagaaacgcttgaacctgggaggcagtgagccgagatcgcgccactgcactccagactgggagacagagcgagactccgtatgaaaaaaaaaaaaaagttactacggagaaataaacaggccggcttcacctccaacctagtggggaaaaaaagcctaagagggagtgaaatgaaggatgggggagcagaagtctccacccctccctttggccctaggcactccgcattgttgtgcatggggacctgagactttctttgacccgcacgggcaactcagcctgccggctttctgagagctggggtgcaggagtggggattaacaccccctaatgcagccctcagccatgggctgagagattggtggataaatacccggcttcctggacgacaggcggagggacttccccttgcctttcaaggtatggggaatggaccaccagcagctgcaaacctgggcgctcatggcaaggcagaatctcccgccttgccccacacctgctgaatcaaaatctgcgtttccgctgggcgcggtggctcatgcctgtaatcccagcactttgggaggctgaggcaggcagataacctgaggtcaggagttcaagaccagcccgggaaacatggtgaaacaccaactctactaaaaatacaaaaattagctgggcatggtggctcactcctgtaatcccagctactcgggaggctcaggcacaagaaccgcttgaacccaggaggcagaggttgcaggaagaggagattgcacccctgcactgcagcctgggcgacagagcgagactctgcctcaaaaaaaaaaaaaaaaaaaaaaaaaaatctgcatttcaacagaatccccagctccctcctacgcacctttaagtttaagaagtggtagtcaaagccaagtgttctcaaggtgtggctggagaccagtagctgtcacatcatctgggaacctagaaatgcaaactcaggccaggtgcgatggctcacgcctgtaatcccagcactttgggaagccgaggcgggtggatcacatgaggtcaggagttggggaccagcctggccaacatggcgaaaccctgtctctgcaaaaagtaaaaaaattagctgggtgtggtggcatgtgcctgtaatcccagctactccagaggctgaggcaggagaatcacttgaacccaggaggtggaggttgcagtgagccgagatcgcgccactgcactccagcctgggtgacagaggaagaaaagaaagagaaagaaagaaagaaaagaaaagaaagaaaggaaggaaggaaggaaggaaggaaggaaggaaggaaggaaggaaggaaggaaggaaagaaaatgcaaattctggagcccttactccagccctttgcaatcagaaactccaatggtgaggcccaggaagctgtgttttaacaggctctacaagtgattcggatgcagactaaagtttgagaatcaccgacctcgttcttaaaaattgttttaaaattaacttgtttttcctttagttgttaggagttaggatccactttgtcatgtgagtttcagggggaaaaatatgactttctttttgtttctttctctttttgaaaggtgatgatccaatgccctttgacattaaagctgagatgacactgaagacaaatttttttgccactagaaacatgtgcaacgagttactgccgataatgaaacctcatggtaagcccaacgtgtggacagtcgggttgcatccctcagtaagaagtgggctacaggcttcccggagcagggctaccctgcagaaatcactcaggggtgctatttctctgaagggggaaaaatagaaaattgcttcattttcccacagtgtttggcttctcactccaacattttagtttagtttagtttagtttagtttagttttgttttgtttggcagtggggtgggtggtgggaagaaattttgctcttgttgtgcaggctgtagtgcaatggtgtgatcttggctcactgcaacctccacctcccggggtcaagcaattctcctgcctcagcctcccgagtagctgagattacaggcacccactaccacacccggctaattttttatatttttagtagagacgtggtttcaccatgttggccaggctagtcctgaactcctgaccttcaggtgatccacccaccttggcctcccaaagtgttagaattacaggcgtgagccactatgcccagccttagctttaagttccaaagataagtgtgacatatcacaatgcttttgggatccatgtcatgaactcaatcctagaatgatagaatgctgtgagtccccaaaggccgcttgcctctggtcaatctcatgagtcctccagccctccaaggtgatgggcccacatctagctcatctctggaccttggtatctgttttagcattacaacttttcctatattcctttcttcttataccatactttctcaagttgattcagaaaacccaaaagaaattttcttttctttttttttcttttctttttttttttttttttttgagacagagtctcgctctgtcatccaggctagagtacagtggcacaatttcggctcactgtagtctccgcctcccaggttcaagcgattctcctgtctcagcctctggagtagctgggattacaggtgtgcaccaccacgcccagctcattttgtatttttagtacagatgggatttcactatgttggccaggctggtctcaaactcctgacctcaagtgatccacccacctctgcctcccaaaatgctgggattacaggtgtgagccaccatgcccgaacgagaaattttctttattaggaaatgtcttgcctatacctgcaggtattcaataaatgttactattatacttttcctacaaacattggagtgcctgccatattccaggcattatgctgggatctgggtgtgcaatggtgagcattatagacagggaccatctcattggtggagctgaaactctagtgggggagatatccattagcaaagaatctgaagtgtgaaatgacagctgtgctggggtacagggaagcttgcttccttgaggattttattccccaagaagttaactgtggattcttagaactgtggtttttattaaaaatgtgcttgctttttctttttttttttttttttttgacagagtttcgctctgttgcccaggctggagtgcagtgacaggatctcagctcactgcaacctccaccttctgggttcaagggattctcctgccttagcctcctgagtagctgggactacaggcgtgtgccgctacgcccggctaatttttatatttttagtagagacagggctttgccatgttggccaggctggtctcgaactcctgacctcaagtgattcatctgcctcagcctcccaaagtgctgggattacaggtgtgagctactgcacctggccagaagtgtgcttttcttaatttaacatttcgaatatggattattggccgggtgtggtggctcatgcctgtaatctcagcactttgggaggttgaggcaggaggatcacttgagcccacgagtttaagaccaggctgaaaaatatggcaagaccctcatcactttaaacaaacaaacaaaattatctctggatgcaaaaccttttttttttttttttttttttctgagacagagtctccctccgtcgcccagactggagtgcagtggcatgagctcagctcgctgcaacctccgcctctcaggtacgagagattctccgccccagcctctcaagtagctgggtttacaggcgagcaccaccacgcccagctaatttttttgtatttctagtagagacagggtttcaccatgttggccagcttgatctcgaattcctgacctcaggtgatccacccgccttggcctcccaaaatgctaggattacaggcttgagccaccgcactcagacgcaaaaagttcttaacctaagaaggtgaatggtgagagttgcacttgtactctgtcagtttctgagtgggatgagatcatagaaagcctgcagggagaactgcaggtgctttgaaggggatggagtttctaaatgcaaatctgagccaatataaacgcacattttaaaaactctcctttttacacagaaggtaacatttcatacaatgtttgccactttgctttttttactccttatgtctggggctctctccaggtttggtcagaaagcttttatcttttttgtggctatatagggacgcagccattatagggatgtcttttacccagtgttgggaagttttctcccgataaatttttgaatgggaacttgagagctgcaaggtattaagacacctttaaaactccatccccttccagagcacctgcagttctccctgcaggctttctctgatcccatcccactaaaaaactgagcaagtacaagagtacaagtgcaattctcaccattcacctttttaggttaagaagtttttgtggccgggcacagtggctcacacctgtaatcctagcactttgggaggccaaggcaggcagaccacgaggtcaggagatcgagaccatcctggctaacacggtgaaaccccatctctactaaaaatacaaaaaaattagccaggcatggtggtgggcacctgtagtcccagctagtcgggaggctgaggcaggagaatggcatgaacccgggaggcggaacttgcagtgagcccagatcgcgccactgcactccagcctgggcgacagagccacactccatctcaaaaaaaaaaaaaaaaaaagaaagaaagaaagaaaagaaaatatcataagaatggacttaatcctgagcaacatatggagaccccagctctacacaaaaaatgaaaattaaaaattagctgggcatagtggcatgttccagcttctcgagagactgaggtgggaggatcgcttgggcccaggaggttgaggctgcagtgagctatgattgtgccactgtactctagcctgggcgacagagcaagtccttgtctcaaaaaaaaaaaaaaatgcatttaacgcatctgacctaccaaacaccataggtcagcctcgtctagcttcaaggtgctttgaacgcttacattagcctatagtctggcaaagtcatctaacacaaagcctattttatcataaaatgttgagtatcttatgtaatttattgaatctgtactgaaagtgaaatgcagaatggttgtatggggcctccaagtacagattctgcagaatgcatatcgcttcctcatccatcagtgaagtcagtaagtcctaagtggaaccatcagagggcagggaccatctatctgtatttgacttgcttatttgttcaaggttctgagtcaataggacaagcaactactaagccactagagggcgcaacttgcctactctttctagagtaaggcagcaggtgtttcgggaccggtggggccacctggacctcagtggagggtggtgtgggtgcagcccttcccagggctgatgacgcatctggctgacgaggctgactgtcagcctctggcctctctcccagaggtgtgccctcagatcaaagaggacacctcctccccttaagaggatttatttcctcgaaggcacagcttctatgatctgtgtttttctttcttcctttcccattcacatttaattccttgtagccgccaagtttctgagaacaaagctgtttagaaagcaatgaagaacacaacatcactgatgtagtattcctggccaaaatattgatgtgactctcctcatgagaacagaccaattcactttgagagaaatactacaaaataatggtctacagtcttcaaaaaagtcattgccaactaccttacattaaaatatatgaaagagatgtgacaattaaatgcaatccatgggccaggtgcggtgactcacgcctgtaatcccagcactttgggagaccaaggcgggcggatcatgaggtcaggagattgagactatcctcgctaacacggtgaaaccccgtctctactaaaaatacaagaaattagccaggcatggtggcaggcgcctgtagtcccagctacttgggagactgaggcaggagaatggcatgaacccgggaggtggagcttgcagtgagccgagatcacgccactgcactccagcctaggtgacagagcgagactccatctcaaaaaaaaaaaaaaaaacgcaatccatgatcctactttggaccctggattaaagcaaacaaaaactgtaaaagaacattactgggacaatttggacacatttgaatatgggctgtattttagataatagtgttgtataatgataaatgcctggcatgtggtcataactgtagtaatgtaggggaatgcccttgctaccatatataatactaaagtgtttaagatgaaggtttatgatatcagcaacttggagagaaaaagggacagagagggaaaaagcaaacacagcaaaatgttaacaattagtgaacttaggtgatgggcatagggtatttatcgaactattcttgtaacttctctgtaacaggaaagaaatacatacatacacttcatctttgaaagtgagagagagaaggaaggaaagaaatactgaatagtactaggtacctggggggatgagtgaggtgctagtttccaaggacagagtgagggtatctcttgtgggattggggtccacaagaatgtgcagctcccttgcaatgggaacttgtggggaatgccattcagaaaatgaaataaaatctacagatccggccaggtgcggtggctcatgcgtgcaaccccagcactttgggaggccgaggaaggcagagcacctgaggtcaggagtttgagaccagcctggccaacatggtgaaaccccatctctcctaaaaatacaaaaattagctgggcatggtggcgcacacctgtaatcccagctacttgggaggctgaggcaggagaatcacttaaacccgagatagaggttgcagtgagctgagatcgcgccactgcactccagcctggacaacagagcaagactcatctcaaagaaaaaaaaaaagaccctattggacacagagaatatgcattcagaataatacataataaaagaactcactaaaattagtggggtttgatgctgatgaaatgtgtaaattaacacatttactggtttttggatttccaccagtacttcaaattgtaaaatttttggcctacatatttgtttctatgggcacaattgtctctttagtagctgtgaatcatgatcaacatgaatattaattcataatttaatgaatattaatattatcaaatagggactaaaaagtaatgaaatcaggccggatgcagtggctcacgcctataatcctagcactttgggaggccaaggcaggcagatctcctgagctcaggagtttgcgaccagcccggccaacatggagaaaccccgtttctacgaaaaatacaaaaattatttgagtgcagtggtgtgtgcctgtgggcccagttatttgtggggctgagacaggaggatcacttgagtctgggaagtggaggctacagtgagccgagatcatgccactgcactccagcttggctggcagagtgagattctgtctcaaaaaaaaaaaaaaaaaaaaagtgatgagataaaaaccaggatggaaaaacagcccattccacacgtgaagtgtccataatgaaggacagacagagtcatccccagggattccttactgctggttgtggcactaaggaattggggtggctgcccactgtcctaggacattgggtgtgcctaggaaattgagagctttagtccttagggtgagagcactgtccctcagaaagcaggtttataagtacttggagtgtgtatgctggggaggagcagttttataaaactgccagcgggctgggcacacggtggctcacacctgtaatcctagcactttgggaggccaaagcgggcggatctcttgaggtcaggagttcaagcccagtatggccaacatggtgaaacctcatctctactaaaaaaatacaaaaattagctgggcatggtggcacacaccttcatcccagctacttgggaggctgaagcagtagaatcacttgatcctgggaggcggaggttgcagtgagccgagattgtgccactgcactgcagcctaggcaacaaaacaagactgtctcacaaaacaaaataaaaaatttttaggccgggtgtagtggctcacgcctgtaattccagcactttgggaggctgaagcagtagaatcacttgatcctgggaggcggaggttgcagtgagccgagattgtgccactgcactgcagcctaggcaacaaaacaagactctgtctcacaaaacaaaataaaaaaattttaggccaggtgtagtggctcacgcctgtaattccagcactttgggaggctgaagcagtagaatcacttgatcctgggaggcggaggttgcagtgagccgagattgtgccactgcactgcagcctaggcaacaaaacaagactctgtctcacaaaacaaaataaaaaaattttaggccaggtgtagtggctcacgcctgtaattccagcactttgggaggccgaggtgggcagatcacttcaggtcaggagttcaataccagcctggccaacatggcaaaaccccatctctactaaaattacaaaaattagctgggcgtggtggtgggcacctgtagtcccagctacttgggaggctgaggcaggagaattgcttgaacccggaagtcggaggttgcagtgagccaagattgtgccactgcactccagcctgcgtgatagagcaagactgcgtcttaaaaaataaataaataaatttaagtaaaagtaaaaataaaactgcctggggaatctacaaatttactacctcacccatctctcagcgaatccctgagaaagggagccccccctgtcactgatggaggtgtgttcttccccttgggagaatagggccaaaaaaattaaatcccatgggtgcatagattttatgccttctatagtcacatttttaatctttttttaaatttgattattactttttgagaaagggtctcattcgtgtcacccaggctggagtgtagtggagtgtagtggtgtgatcatggctcactgcaatctctacttcctggattcaggtgatcctcttacctcagcttcctgagtagctgagaccacaggcacacgccaccacacccagctaatttttctattgttagtagagacagagttttgccacgttgcccaggctggtcttgaactcctgggttcaagtgatccactcctctcagcctcccaaagtgctgggattacagatataagccacagcatccagccacttttttgtttttaatcagcaattaaacctacacaatggccaggtgcggtggctcacacctgtaatctcagcattttgggaagctgaggcaggaagatcacttgatgtcaggagttcaagaccagcctggccaacatggtgagaccctgtctctactaaaaatacaaaaattagccagaatatggtggctcacgcctgtaattccagctactcaggaggctgaggcaggagaattgcttgaacctgggaggtggagtttgcagtgggccgagatggcaccagtgcactctagcctgggcaacagggcgagactctgtctcaaaaaaaaaaaaaaaaaaaaacctgcaccaagactcaatcatatgtttggtatattattcaaccagtggttgtacctctgtgatatgctttcatatatttatcattctgtttcagggagagtggtgaatatcagtagtttgcagtgtttaagggcttttgaaaactgcagtgaagatctgcaggaaaggttccacagtgagacactcacagaaggagacctggtggatctcatgaaaaagtttgtggaggacacaaaaaatgaggtgcatgagagggaaggctggcccaactcaccttatggggtgtccaagttgggggtcacggtcttatcgaggatcctggccaggcgtctggatgagaagaggaaagctgacaggattctggtgaatgcgtgctgcccaggaccagtgaagacagacatggatgggaaagacagcatcaggactgtggaggagggggctgagacccctgtctacttggccctcttgcctccagatgccactgagccacaaggccagttggtccatgacaaagttgtgcaaaactggtaaacgtctgcttcggagcttgctgcttaataaatgttggtggaatgaatgaatgaattgatgctgtggtttgattatttctgttctttttttttttgagacggagtctcgctcttgttgcccaggctggagtgcagtggcatgatctcagctcactgcaacctctgccacctgggttcaagctgttctcctgcctcagcctcctgagtagctgggattaccaggcatctgccatcatgcctggctaatttttgtaattttagtagagacggtatttcaccatgttggccaggctggtctcgaactcctgacctcaggtgatctgcccaacttggcctcccaaagttctgggatttcaggcatgagccactgcacccggcctttttttctctttcttttctctctctctctctcttttttttttttttgagatggagtttcgctcttgttgcccaggctggagtgcaatggcatgatcttggctcaccgcaacctccgcctcccaggtttgaatgattctcctgcctcagcctcctgagcagctgggattacaggcatgtgccaccacacctggctaattttgtatttttagtagagatggggtttctctatgttggtcaggctggtctcgaactcctgacctcaggtgatccacccgcctcagcctcccaaagtgctgggattacaggcatgagccaccacgcctggcctctttctgttcttgaaaaggaatgttcataagaatctccctgggagaaacgtgtctagttctggaatctggagctgaacaacattgctatgcccaactcttcagcctgagagggagaagaacatagtctcaaattttagtgggcatcgggaccacctggagggctgattaagccagattgccggttccactccccacaccaattcacttcatttctaacaagttctcaggtggtgctgacactgctggtgctgggactgcacttagaaccactggtgtagcaagtggtttcagaactatggagccattttctagctgttccttgctgtttccagttttttgattctgtaagggtgatgctttatcctctatttccttagctctgcaagctttctttgcatctcattctgttttgagtatatttttattggttgttttactttttttttgcttgagacagaatctcactctgtcgcccaggctagagtgcagtggcacaatctcagctcactgcaacctctgcctcctgggttcaagcaattcttctgcctcagcctcccaaatagctgggactacaggcgcccaccaccatgcccagctaatattttgtatttttagtagagatggggtttcaccatgttggccaggctggtctcaaactcctggcctcaagtgatccgcccaccccagcctcacaaagtgctgggattacaagcatgagccaccacacccggctggttcttatacttacaaagtagcagagcttgaaggactcaggaggaatatcttctttaactgggacatgatttcttctagatttttcagctgggttttgcattctgcattccttcccagaatgtttacgaggttgcccagccaccgcaactgtatctctttactgaaactcatgcagatgtcttctccttaacctatgcacactccctgtgaactacagcccagggtgattcttcagtaactccctaagcctttttttttttttttaatttgagacagtgtcttgctttgttgcccaggctagagtgcagtggcacgatcatgggttactgcagcctcgacctccagggcaagagacttccatgactaaaacctcaagtgatcctcccacctcagcctcctaagtagctgggactacaggcatgtgccatcatgcccaaataatttaatttttggtagagacagggtctcactatgtttcccaggttggtctagcactcctgaactaaagtgatcctcgctcctttgcctctcaaaacgctgggattccagacatgagccaccgcacccaccctctttcataatttttttttttttttcagacagagtcttgctcggtcgcctggctggagtgcagtggtgccgtcttggctcactgcagcctccacctcccaggttcaagcaattctcctgcctcagcctcctgagtagagtggctgggattacaggcgtgcaccaccatgcctggctaatttttgtatttttagtggagatggggtttcgccatgtaggccaggctggtcttgaactcctgacctcaggtgatctgcctgccttggccttgcaaagtgctgggattacaggagtgagccaaagcctcttttataatcattatgacaataggtgagttcacattctctgctttcaaatgggattggttttgcaacaggcctcctggcttctggttacaccttgtagaaaaaagtcttggagagcaaggagtcttctgaaatagaagaaatgtactcgcaaaggcttgcaagagtgtcaaggcttcggcaagaaggctaatcacacaaaaaaattcagtggaatttacattccggctggccacagtggctcaagtctctgatcccagcactttgggaggctgaggcaggaggatcacctgaggtcaggtgtttgaaaccagcctgggcaacacagcaggcctccatgtctgcaaacaaatcaaacaaaacttagccagacatggtggcacacacctgtagtcctagctacttggtaggctaaggtggaaggatcagttgaacccaggagttcaaggctgcagtgagctatggtcgtgccactgcactgcagcattctgggtgacacagccagaccctgtctctacttaaaaagaaaacgaatccattgaaagatggaaaaaaaccaaagggaaataactacaaatttgccaaggttaccaagtttatgataggctgctcactgtgtgaaattagaaatgttgtcacttgattatcaaacccacaaatgtcacatcatatcccctgacataggtaagcactgcagtcataagagataatgccgtttttccttagggaatcagtaaagtatgggaatgctcaagtttcttttatttgggggaactgaactgcacaggatgacctggttatttctggttcatcacagtatgtagctatttgtttttcttaactctctgatttacaatggcagcacctcaaagtgtcagtttaactctcacagcctgcacccactttttcatccacttggggtagggggaagtctgaatcccacctagactgcatttaacatcttgaggccagatggagtggctcatgcctataatcccagcattttgggaggccaaggcaggcgggttgcttgagcccagaagtttgagaccagcctggacaacatagcgagacccctctctacaaaaattcaaaaagatcaggcagacgaggtgcacacctgtagtcccagctactcagaggctgaggttgggaggatcacttcaacctgggaggtcaaggctgcagtgagccatgattgcgccactgcacttcagcctgagtgacaggacaagaccctgtctcaaaaaaaagcctaaaacaacaacaaaaacttcctttagcctatttgtatgtcactgattaaatccaacatgctcttatggtattcatctcaggctacagctcctaagacattttaatgtctcctttcctggctctaaaaacaatttaatggctttcaatcagcttcccgagtatcttttgtactctcgcctccctctgcagccaaactccagtcctgctaatgccgggcaatagcccaggaaccacagagcacttcaggctctgcctgacaaagttacagacaggaagttcagaagaaatgagccagtcccttttatttcttcttcctcttttgtctctaaccaatcctttttggataagtgtgtaacccacttcctcttttgtctctagccaatccttttaggataagcatgtagctcatttggatgacccttaactgtcaactgctggtcagaatgacatttctcattcttagagaagggctgccattagcccttattggatggtctgcccagcaccctcttccaaaatatgatctcctgccctcccctgccccctgcttccttcccatgtttgcagctgcagctgccacaaggtgaccttgcctctgttgactgctccagctataggtttttcctctaaaaagaaccagctggattggatcagagttgttactgtgcatctcaccccctgtgcctgaggagcagagggagccagccattgccagagaaagaggccaaccatcaagaggagcatttaagccaggtgtggtggctcctgccagcacaatcccagcactttgggagatcaaggcaggtggatggcttgcgctcatgagtttgagaacagcctgggtaacatggtgataccctgtctctacagaataatacaaaaattagccaggtgtggcagtacatgcctgtagtcccagctacttggggagctggggcaggaggattgcttgagcctgggaggtgtttacagtgagccgtgtttgtatcagtacactccagcctggatgacaaagcgagaccctgtcttggggaaaaaaaaaaaaaaaaagaaaagaaaagaagtggcccaaagagaaactcccttccctgtcctcagatcattcctgaaatcttgaattctcagagatgctccaagatacccttgtatccttaaaatatattttctttttcataagctatattgaattgggtagttgttgcttgcaatcaaaaggaacctaactaatagaagtgcattaacatgttttatagtattgtgaaaggaaaataaatcttggggccccaaaatcactaagctaaagggaagagttaagctgggaactgcttagggcaaacttgccttccattctattcaaagtcaccactctgctcactgagataaatgcatatctgattgcctcatttggagaggctcatcagaaactcaaaagaatgcaaccatttttctcttacctacctatgacctggaagtcccctccaggcttccagctgtcctgccttcacctggagctgtcccacctttctggattggcccaatgtacatcttacacatattgattgatgtctcatgtctccctaaaatgtataaaaccaagctgtgccctgaccaccttgggcagaagttctcagaacctcctgaggctgtgtcatggttgcccatcctcaaccttggcaaaataaactttctaaattaactgagacctgcctccgatgttgggggttcaccctatgctgtaggaaaaaaaacaattgggcttggaatcaaaaggagaaaaaaatcatgaattgagaacctatggcaaattagaccatatgtcctgcttaatgctttcccaacatggttttaggtaattctgactatagtcctttgccttagttcattttgtgttactataatggaatatcacaaactaggtaatttataaagaaagtaaatttgcctgtgcacagtagctcatgccaataatcctataactttgggaagccaaagtgggagcatcacttaaggccaggagttcaatgccagcctgggcaacatagagaaaccctatctctacaaaaaataaaaattgaccaagtgtgatcatgctcacctttagttctacctacttggtaagttgaggtgggagtatcacttgtgcccaggagtttatggctgcagtgagctatgatcatgccacttcactccagcctaagcaacagagactctgtcacttgtctcaaaaaaaaaaaaaaaaaaaaagtaagtttatttctcacaattctggaggctgggaagtccaaaagcatggcactagcatctggcaagggcctgcttgtgtgttctaccatggcagaaggcagaagggcaagagaatgctcacaaggtgcaaactaaactcatccttctatcaggaatccactcccctgataaaggtattaatccatttatgagggcagagtcttcactcatgatcttaaaggttccactttgcaacactgttgccttggggattatgtttctaacacatgactttaggggacacattgaaaccactgtatcctttaaggtaggaatcaatgtcatatttgtcatatttcgaacgaagaaataaaggtttggagaggttaattaacttgcccaagatctcagagctaaagccaggatcatatctaggactgactacaaagtcctgtggtctccagtgcttggcaggtccagcttcactgatgagtctagagagtagtaactctcttggtgtaagaactaagggagatgatacattaaatctaagtgtaaattagattatgcttaaagtataagtcatatggttattattaatagatccccaagttagcctatatgtgaacttttccatagagaaatgaagcatggtttcaatgcagcatattttaaatggattatctcatacaatgtgttttttgtttgttttatattgtttttgttgttttctgagacagagtcttactctgttgcccaggatggagtgcagtgacatgatctcagctcactgcaacctccaactcccgggttcaagtgatcctcctgcctcagcctcccaagtacctgggagtacaggtgcatgccatcacacctggctaatacaatgtgttttttttagacaccagagggagccagtggttctttccacatcagcttttctgtgaaacatttttcttttttttgaaatggagtttcactcttgttgcccaggctggagtgcagtggcgccacctcagctcaccgcaacctccccctcctgggttcaagtgattctcctgcctcagcctcccgagtagctgggattacaggcatgagccaccaggcccagccttgtgatagatttttctagactgttgcatgtgtggtacacccacatacaatatcagctttagactcaaccctttgactttgccttcacctactgaacagcaacaaggattgtgacagaccaagaatctgaagaaggatgcagtgtggagacgaaacaggtgtcaatgacaaaggtttagttgttatttcaagtcaactgcaaagtggatgcggtatcaagtatagaaactgcacaggacttctccactaagaacatggggagggcaaagggaatggatgttttgagaaaggaggcagaagccaacagagaacagtggttattaccaagatgggtggagtagaagttagtttatagaagacattggcttaggcctggtgcggtggctcacgcctgtaatcccagcaatttgggaggccgaggctggcagattacttgagggcaagagttcaagaccagcctgaccaacatggtgaaaccccatctctactaaaaatacaaaaaattagctgggcatggtggcgcacagctgtaatcccagctactcaggaggctgaggcagaaaaatcgcttgaacctgggaggcggaggttgtagtgagccaagatcacaccactgcactccagcctgggcaacagagctagactccatctcaaaaaaaaaaaaaaagaaagaaaaaagaagacactggcttagagggtcaccaatatctgcatatcaaaactaagaatgaatttacttggccaatctctctactgggtgatcagcctgagccagataatgcagtgggttctgatttataatgccttctttactgtcaagaggggtaaggattaaagttccggtttaaattaaagttgaaatgctttacttggtttgagtattattatgaaaggaccctgaccgtttctgcatgtcttaaactgatgaaagtagctaagtagacttttaagttgtgacaagacaacttgatccaagaaaacatatttcttgtcagaatatgcaattttttttttttttttgagatggagtctcactctgtcactcaggctggagtgcagtggtgtgatcaaggctcactgcaacctctgtctcccaggttcaagcaatcctcctgtctcagcctccccagtagctgggactacaggtgcacaccactacacccagctaatttttgtatttttagtagagacagggtttcactatattggtcgggctggtctcgaactcctgacctcaggtgatccacctgcctcggcctcccaaagtgctgggattacaggcgtgagccactgcgctcggccagaatactcaaatctcaatgttgtacatttactgtcaatcctgtcagtatcagtatattgtatacagtatacagtaattgacagtatactgtcaattataaattgagttttttaaattatgatttacaaatgaatttgtcaaaattaaattaaacccccccacacgcacacacacctggaatcctttacagataggtggtatatgaatacaaggcacagattgtatgtgcatggtggctttggcacaaacagactacttcttttttcaatgttaagtgtaaagcagttctttcatctctgttcagtgcagtgttgagtgtgactaggatttgaagaacctaaaaaaaaaaaaaactcacctgcttgccatcttcttgttttttttttgttgttttttggtttttgctggttttgtttgctgcttttgtaaaaccagtttatcatattctcattaggaaatcaattttcatgaaattaattttttttcctgctaactatggctcaatcttttcgtttctctctgcttctatcttaagaccattcctcaaattgaccatgagaggatttacatctggggcacttggtatatgccaaatggagacaaaatcagaatcagcagcctggctgggccacaggtccagcatcccaagctattaaaatattcttagtgtttccagggaagtgatagatccactttggaagctgataatatacccctcccctagaaacatgcatatacacaaagtgttctaaacaacttccaggtgctcatgacctcccccacctcccaagctcattgaccactgcctcgccttcacgaactccagacctggtctgaacatttctaaaggacgctcgggagttaaaaggagcgaggccactgcagaaatgacagccttcatccacaagtggcccacttcgggttggctggagccacagctgggtggggacagggcctgtgctcaggtgagcactgcctaccgcgcaccctccaggtgcgtcctaccctgaagcggtcggactggaccgtctaggtcccagcgctcgagaggatggcaggcaggggctggtgattgtctggagatatgaatgctttctaaggttgacgtcaaggtctccttcctgagccacagtccacgtgataagctctgtccaggtagaaatgatctcacctctcctgtcgcccagggtcggaaacctgaggcccgtgcgggctggggcaacttagcaggggtcccaagcccgccgcgccccctgcgccccaaacgtgtgtggagggcttggacgtggtccagagggaaaagatggggtgaaccaggtgccgcgcacccttcgaggagcccccgcttctccgtttctgtgagtgactccaaagcacctccgagggccgacacacgcgcggacgaccttgggcgggcactgaccaatgtccccttccactcggttgtgtcgggggtccccaggtgaggcgcgaacgccgccccgctcacctgtacgaggcctttcccggagcagcccggctacgaagcgacacccatggcggagaagctaaggaagactcccgctccctcacaccgcggctgaggcgactgaaccgccccagtacgccggggccctccccaagccctgctcccaagccgaagccccgcccccgcgtctaaggcccacctccaggccccgcccctgaccccgactccgtgagtcaagcctggcctttcagtccagcccagcccgtcgaggccccgcccctgttgttatggcccgcctccaggcaccgcccttgatcccaccttcatgagtcaggccccgccttccagcctagcccggccagccgaggccccgcccctgtagggacagcccacttccaggccccgcccttgatcccgcctccttcggtcaggccccgtcttctagttccgccccgcccgcggaaaccccgcccccgcgcgcctatggcccacctccaggtcccgcccctgagcccgcctccaggcgtccagccccgccttccagccccgccccaagcgccgaggcccggcttccaggctccgccccgacccgcgcggtggggaagagccgctgccgctggttctccggctcttcctcggcggttctggctcccggccgcgccgcagccctgcccagtctctctcccccagcccggagggctcctccgcgccgcacgtgagcgcgcccgccaacagggccactgccgcggtaagtcgtgcctgcgccctgtccggcgtccagtcctcagccgctgggcgaagccggaggagccgggcatctcctccccgccggcccgcgggtccttctccgggtccagagggcttgggcggcgccgtggggcggcccggggtgcaggtggcttaccggcgcgcggcccgggcctgcggcgcgctctgctgcagtgcgggggcggagagctcggggccggagaccgggagggcagcggggagactgggtggggtcccctagggttacccgaccctggcgcggaggatatgatgccggccacgccctcgccgagcggggcggcaggtgcaggtccaggggtgggtcgcggcccgcgcgccctcccggggccggcccacgaagagacgctcagcctttgtttgctggtgccctggctggggaggaggctggggacgcagacctgtgagaactaagggctttcctcgttggggaagaccccagtcttccagccagtccccaggagaagggatccgggccgcagtgcgcgctctgccagcctggcccctgcgccctgcagggttcccggctgctcgcggggactgttacccgcagtgttgccttacactcgcgactgcagccccacaattgggaagactttgctaggatttttttggtaaggcgagggaagaccgtccccccggccccacaagtctgctgccattaggtggcttaaattttttccagtacaatttaattgccactttgaaagaccacattcaaaacagtgtgtcccagagttgattaagcccattggtgatgagtgtttctgtgctgtggactaaggatcattatcaattttattactaatagtacatatctgttatctgttgctaaatgtttttgcttatgtggtagggtcactgtcctcattttcatcgaactgagaaatgttccttcatatagacatatttacagtgaacttttttgggatctggcagttggtttttctcttgaacttgtttttttctttttctaaattattattattattattattttgagacgaaggtctcattatgttgcccagtctggtctcaaactcctgggctcaagcaatccttccacctcggcctcttaaagtgctgggattacaggtatgagccacagtgcccaaccctgaatttgattttctatgaaattaaaaatgggtaaagagagagatttcttgctgacattttcgattttaaggtatctgagcagatacacttcttgtgtgattacttctttctgtgtctagttatttatagcctgtataactgtcggttttactgaactcttcaatctctcacaggagacatatccaggatagattgcaagatcattggcaaaagagctatttgagaactgaaccaataattttatcagtagcataatgtagtggagacctgtactatctcactgacctgagctcgaatctggttctgctagctgctgggtgtgtgacctgggcaattttccgaatggcctgacttctaatatcctcatcttgggcctaatacccatctcacaggactcgtgtattgcagtaaagaaatgcatgcagccgggcgtggtggctcacacctgtaatcccagcactttgggaagtcgagggggtggatcacaaggtcaggagatcaagaccatcctggccaacatgatgaaactgtgtctctactaaaaatacaaaaattagttgggcgtggtggcatgcgcctgtagtcccagctactcgggagtctgaggcaggagaatcacttcaatctaggaggcgcaggttgcagtgagccgaaatggcgccactgcactccagcatggcgacagagcgagactcttgtctcaaaaaaaaaaaaaaaagaaaagaaaaaagaaatgcatgcataaggccaggtgcagtggctcatgcctgtaatcccaacactttgggaggccgaggtgggcggatcaccttacgtcaggagtttgagaccagcctggccaacatggtgaaactctgtctctaccaaaaatattttaaaaaattagccaggcattgtggcgggcacctgtaatcccagctactcgggaggctgaggcaggagaatcgctggaacccgggaggcagaggttgcagtgagccaagatcacaccattttaccccagcctgggtgacaagagcgagactctgtctcaaaaatcaaaaaccaaaacaaaacaaaacaaaaaagagactgggcgcagtggcttatgcctgtaatcccagtactttgggaggccaaggtgggtggatcacttgaggttgggtgttcgagaccaggctgaccaacatggagaaaccccatctctactaaaaatacaaaattagccgggcgtggtggcacctgcctgtaatcccaggtactcaggaggctgaggcaggagaatcgcttgaactcaggaggcggaggttgtggtgagttgagatcgcgccattgcactccagcccggtcaacaagagcgaaactccatctcaaaaaaaaagaagaaaaacaaatgcatgcataaatggtgaatttaccaagctcacccagaagacttgcttggtagcataccacgtgccccatatttcgaaataaaggagcttgcatgaatgacgatttccaaacttctctcgtgtgctggtagttacaccaaatagcactttcttcatatggccaaccataacactgaactgctccagctactgctcttacctggctgatgcccttcttgccatgagcagtggcgtcccttgccaccccaccttctaaatacacaccttatcgtcaatacacaccttatcacagttctcttcctggtaactctagctgcccacacctctggactttgaggactcctctgccggtggctgagtttcctcttggtatcatcagactctgtcattttgtccaccctctgtcacttatgtgtgttaaaaggagcaaggccactttgtccaccctctgacacttacgtgtcccacattaaactgaaattatgtatttaggtacttccacttttattaggctatgaactatgagagtagggaccttgtcttatttatgtttctttcccccatgtttagacacttagtagagtgaacagactgtgcaccattggagtattgcggtggtttagagatgctgggtttcagaactgaattttctggaaaaaataataataataataataatatggaccattttggatatatcaacttcttagtctttacttggcaaaaggaacaaactaccagctctcattaccatcttttccttaatattttcaaaatgtgtgaaggcagttatttcagaaaaagggacaggccttcccaggattgagtaggcggtcttattttgtgggtgggtgtgcaaggtgcagtatatttttgcagagaggcacgcatatgcagaggctctgtggcaggatgggtccgtcttggggttggagggtgcagtgacaagtgggtagagtcttgtaagctggaaaaggggttgtttggttctattttaagttttcttttttttttttttttttgagacagagtctcactctgtcacccaggctggagtgcggtggcacaatcccagctcactgtaacttccacctcccaggttcaaactattctcctgcctcagcctcccgagtagctgggatcacaggcatgtgccaccacacctggctaatttttgtatttttagtagtgacggggtttcgccatgttggccatgctggtcacgaactcctgatgtcaggtgatccacccgcctcggcctcccgaagtgctggggttacaggcgtgagccactgcacctggccttattttaagctttatggaaacaattttaaacatggcagttgtatgcattgttttaaaaggattcttggagcactgtgtgtaaaggcactggaaaggggcaagtgtgggagaatcattgggaagctcctgcaaacatgcaggcaacaggcagcccacactgcggtgtggcgatggagagcaattgagtcaacaggtgtttaggaagaagaggcaaacaggactggggttgagcatggcaggagaagagaaggaagagtctagaataatccaacaggtaaaggggctactttctgagaaggaaaagatgggagaaggagcatgttgagcagatggaattgagagtttactgttgtttttttttgtgtgtgtgttttgttttttggtggggacagagtctcactatgtcacccaggctggagtgcaatggtgcgatctgagcccactgcaacctccgcctcctggattccagtgattctcccgcctcagcctcctgaatagctgggattacagccaccatgcccagctaatttttctatttttagtagagatggagtttcaccatgttggccaggctggtctcgaactcctgacctcgtgatccacccacctcggcctcccaaagcgctgggattataggcatgggccactgcacctggcctagttttattttttttaacagctttattgcactataatttgcagctcataaaattcattcaagtgtataattcagtgttgttgttgttgtttttgagacagggtcttgccatgttgtttgtgacccaggctggtcacaacctccggggcagaagcaatcctcctacctcaacctctggagtagctgggatcacaggcatgagccactgtgcccagataatttcagtgatttttcatacatttacagagttgtgcaagcatcgccatcatcccattttagcacgtttgccttacctgagaaagatcgccgtgcccagtggccattactccctgttttcactgcaccccaggcagccactaacctacttgccttctctctagatttgcctgtggagggcatttcatatcaatggaatcatacaatgtctggtcttgtgtgtctggcgtcttccactaagcgtgtgttttcagggttcatccaagttgcggcgtatcagtatttggttcctttccattgcctcagcgttcctttgtggatagaccatattttgtggatggatgcttgtcttagttaattcaggctgctccaataaaatagtgtaaactaggtatttctgttataagtgacagtagtgtattcctatagttctggaggctgagaagttcaagatcaaggtgctggcagattcggtgtctggtggggcctgcttgctgtatcctcacagtggaaagaacagccaggctcccttgggtctctttaatttagtttatttgtttgagacagggtctcattctgttgcccagactggagtgcagtggcatgatcatggctcactgcagcctcaacctcccaaactcaagtgatcctcccaactcagactcctgagtacctgggactataggcatgtgccactacaccctgctaatttttgtattgtttgtagagatggggtttcaccatgttgctcaggttagtctcaaactcctggactcaagtgatccacctgctttggcctcccaggatttcagatgtgagccactccgttcagctggtgtcccttttaaaagagcactaatcccatgacataatcacctcccaaagtcttcactttcttttttttttgagatggagtcttgttctgttacccaggctggggtacagtggcgcagtctcacctcactgcaacctccatggctcctgggttcaagcaatgctcatgcctcatcctcccgagtagctgggacaggtgtgtgccaccatgcccagctattttttatgtttattttttggtagagatgggttttcacgatgttggccaggctggtctcaaacatctgacctcaagtgatctgcccgccttggcctctcaaaagtgctgagattacaggtgtgagtcaccatgcccagccgccagggaatgtatttagcagttggtagaggaggaggaaagaagttcagagaggtagatgggaaacaagctctggtgctggaggggccagaggagtgtgtgggccaagtggaggctgctaggctgcttaaagaagtggtctgccgcagagtgctactgagaggtaaagtgaggaaacagaaaggacctctgccattggtgacttgaaagtagtggtggttgccaggcgcggtggctcacgcctgtaatcccggcactttgggaggctgaggtgggcagatcacgaggtcaggagttcaagaccagcctgaccaacacgtgaaaccccgtctctactaaaaatacaaaaattagctggacatggtggcacgtgcctgtagccccagctatttgggaggctgaggcaggagaatcgcttgaacccaggaagcagaggttgcagtgagccaagattgcgccaccgcactccagcttggtcaacaagagtgagactctgtctcaaaaaaaaaaaaaaagaaagaaagaaagtagtggtggcctggtgaagattggattgggtctggagtgatcggaaattgaagtatgagatttcatgaaatttttataactgtactggcctgtaaatgaaagactcaagcttaaagaacgtgttgtaccttcagttcagtttcttccatttaccatatttgcctttttatttgattgactacatccaacttgtttagcaatctacccagctaaccgcgttcactcacgtttaactatatagcattgctctgtatttgtctttcctttcagactgagcagtactggtgaaatactatttgtcctcatatatcaattaggattgtggttggctataacagaaaacctgatagaacagtggcttaaacaaattagctgttatgtgcagaaaacatacaccagacattacagcatccggggttggcatgtggtgccttcatcatgccatctggggctgcaggggctctgtcgttccactcagccatcgttagtttgtgactttcgtgcatgtttcatgacaggtgcaagatgtagcttcactccaacatcatgcctttgttctaggcagaaagaggaagaaaggaggacaaaaggcttatgccaggaagtctgcctcctttccaacagccttttgacccacagcttctactgacatctcattgtcaagagctgtcacatggccacctagatgcaagggagtctgggaattacagtgttaccatgaacaaaaccagtgctcctttagtacagaaaaggagaacaaggcatgttgggtagatgcctgccacactttaaataaaacagccaggcatggtgatacatcccaatagtcccagctacttgggaggctgaggtggaaggaaggatcacttgagcttaggaggtcaaggctgcagtgacccgtgatcgtgccactgcactgcagcctgggtggcagagtaagaccctgcctccaaaaaaacataaaaagtttagaaatgccatatgatgggaggggctgtgctcatttaaaattaccggctggcaacaacatatagtctagcagctttggagctttgatcctggaattaattttgtcagttacttggagccctagcacttctatgctgtctgctcctgtttcctgttctcccccagaatccacgagggcgggaactatttatctttcatctcccacagtgcctggcccagaagccttgctaaatatttgaacaggattgcccagtgagtttgtgcacagttgtgtttgtggacacgtgtcttctgtagctctgggttgggaatgatttgtatccccaaatggctctctcatttggttattttttgatttgcttttagatacttttctgctgtgagaatgtaagatggatccagaagagcaggagctcttaaatgattacagatacagaagctactcttcagtgattgaaaaggctttgagaaattttgagtcctcgagtgaatgggcggatctcatatcttcacttggcaaactcaacaaggtatgtagggtgtatcctatttggattgcatggaggtggggacgtaattgtctttttattattataagaaattacatgattatattatttgtattttataatctttatatcattacatattatacagtataatctttatattatttcaaggaaataccattatatatacaatgatgattacaataattagaaaatatagaaaagaaaaaaaccactcataattctgtcctccagtgttacccactgttaacctatcaatgtatgtacctccttccagctttttctgagcataaaaatatatatagtgttcgtatagttgaagtctttttcttaacaatgttaatgtctagacaagataaaatttaaaatggtcaaattaggtattcaaagactgttctttgtatactccttaggatttttatttatttttcttctttgatctacttttttgatccttttactgctgtctggtaactcctagaagaataaaagttgaaataaatattgaaatctgcccaaaacttgtgtgtgtgtgtgcatgtgtgtgcatacgtgtgtgcatgtgtgtgtatggggtcagatctaggaaaaccaaaactggtcacacgtgggcttgaccttgtactctatatcaggggtccccaacccccaggccgctgaccggtaccagtccgtggcctattaggaaccgggacgcacagcaggaggtgagcggtgcgagcgagcattactgcttgggctctgcctcctgtcagattagtggtggcactgggttctcactggagcataaaccctatcgtgaactgcacatgtgagggatctaggttgcatgctctttaggagaatctttttttttttttttttgagacagtctcactctgttgcccaggttggagtgcaatggcgcaaccttggctgactgcaacctccacctcccaggttcaagcgattactcctgcctcagccacccaagtagttgggattacaggcacgtgccaccacacctggctaatttttgtatttttagtagagactgggtttcaccatgttggccaggctggtctcgaactcctgacctcaagtgatccacccacctcggcctcccaaagtgctggggtcacaggcgtgagccaccacacctggccactctttatgagaatctaactaatacctgatgatctgaggtggtacaacagcagatctacagtttcatcctgaaaccaaccatgcgccctcccacccatctgccaccccatctgtggagaaattgtcttccacgtggccagacgtggtggctcacacctgtaatcccagcactttgggaggccaaggtgagtggcggatcacaaaatcaggagatcgagaccatcctggctaacgcggtgaaaccctgtctctactaaaaatacaaaaaaattagccgggcgtggtggcgagcacctgtagtcccagcttctcaggaggctgaggcaggagaatggcgtgaaccagggaggcggagcttgcagtgagctgagattgcaccactgccctccatcctgggtgacagagcaagactccgtctcaaaaaaaaaaaaattgtcttccacgaaactggtccctggtgccaaaaaggttgggaaccacatctctatataagtgacatatagatgggagcattatattttcccatcctttctttcccagaaagaaagtgacacagggactttcaagtgctcagatgaccactacaacatgtaggtagatgatatctgggcttagataagctgtacctggctctgttgctgttcagacaggacctgagtttggagcccaagtgctaggtgggagttaggagatgtctaactctactctgcagatctcagctccccaggccaaacacaccaggggaactggggtgagtgaagaatttcagcagcctgaccctccagccctgacagatggctatcaggcacgctgcagatgggcagttcttacagctcgtggccagtaagctgctggtcttttgcaaggtatatttacgacctgtaaatgtcacggctccgtgctggctggggtggataaatgtttctaaggtctttaaaacaggaaataagagcttgcaaattctttggttttacagctctatctcaggaattctctaggtgaatgcagattgcattcgcagacttgctctgaaggtggattgctttttgaggggaaagggagaagcagtagaaccgcattgagtcccacattcttctggatgtttcacttttcagtactcagccctcctggagtctaagaacagcctactttttctttcttttctttttctttttgaaacagtcttgctctgtcacccaggctggagtgcagtgacacgatctcggctcatgacaacctgagcctcccaggttcaagcgattctcctgccacagcctcctgagtagctgagattagaggtgcccgccaccaggcctggctaatttttttgtatttgtagtagagatggggtttcaccatgttggccaggctggtctcgaactcctgacctcaagtgatccgcccacctcagcctcccaaagtacagggattacaggcatgagccaccgtgcccagccgaacagcatatttattgttggggagggcacagtcttcattatttctgttttttctttttctttattgagataaaattcacataacacaaaattcaccatttacccattttaaagtgcacagttaagtggcctttagtatgtttaccatgttgtgtaacccttactatctagttccacacattttcatcactccaaaaggaaacccgtacccattcagcagttcctccccattcctccctccccccagccccggtaaccacgaatctactttccctctctacggactttccatggaaatggaatcataccacatgtggctttttgtgactggtttatttcatttagcataatgttcttaaggttcatccatgttatagtatgtgttagaattaccttcctttttacagctgaataatactctattgtatgggtaagtcacattttcttttcttttcttttctttttcttttttttttttttttttttcgagatggaatctcactctgtcatccaggctgaagtgcagtggcacagtctcggctaactgcaacctccaccttctaggttgaagcgattctcctgcctcagcctcccgagtaactgagactacaggcgcacaccaccacacccggctaatttttgtatttttagtagagacagggtttcaccatgttggccaggctggtcttgaactcctgacctccagtgatctgcctgccttggcctcccaaagtgctgggattatagacatgagccaccgcgccgagccacatttttctttatccattgatcagttgatggacatttagatttttaccttttggctattgtgaatagtgttgctatgagcattcatttgcaagcttttgtttgaacctcagttttcaattctttggggtgcatacttaggaggggcattgctgggacatacggaaacgctatgtttaacttactgaggagccaccaaattgttttcccagcagttgcaccattttacatatccaccaaaagcaatgcgtgagtgttccaatttcctaacatcctcaccaatacttattttcaagtttttttttttttgacactcgctctgttgcccaggctggagtgcagttgtgcaatcttggctcctgcaacctccacctcctgggttcaagcgattctcatccctcagcctcctgagtagctggggttataggcgttagcgaccatgcctggctaattttttatttttactttttaatacagatggggtttcaccatcttggccaggctggtctcgaactcctgacctcaggtgatctgcccgcctcaacctcccaaagtgctgggattacaggtttgagccactgtgcccagcctattttcagttttttaaaaatgataaccatcctagttgtgtgaagtggtctctccctgtgggtttttttttttaattaataattttaaaaaataacttttattgagaccccaccaggtgcaaaacctgttcctggcgttaagctccttcttcctttgcaattcggtctttctcgagtggtcccatgaatgctttcttctcctccatggtctggaagcggccatagccaaacttggaggtggtgtcagtgaacttaaggtcagtcttctccagagcccatcgtctggtctgcaccagcaaagatgtgcagagaatgagcactcgcttcttggttcccaccacacagcctttcagcataacagagttattggtcacttcaccatagtggacaaagccacccagaaggtcgatgctcttgtcagacaggtcatagtccgtggaggcattgttcttgatcggtttgctgtcctcagtaaggtagccctggtcaatcttacagatcttcttgttgatctcagtgtggtgatggtcgcctttctgcccagcacatgccatggagaaggccacatggtcaggatgccatgccccaatccaggccaccttgcacaggcctcggtgggtcttgtggggcagcttcttggtgtgccaacaactggtgacccctttgtagcctttgcccttggtcaccccgatgatgtcgatcatctcgtccagcccaaacgcttggttcacaggtacctgctgctgtagcccctcctgggctcagtccagcttctcagccatggtgcctccgttcacttggatctccatcagctgggccttcttctggcgcagaggaagtaggcgcgtctgggtgtgggcagcgaggcgggtgacttggcagtgcttcctcatgctgctgaagtcttctccagctgcttcttgccatcctcatcctgccatttcttgcagtacttggtaaaggccttcttcctagatttatgccggttgttagagaaacaccttttgcactcatcgttgatgtgctcagcaaagatggccttgaaggtccggaggcctcaaggggtttccacgtagcccgcaatgcccacaaccaccataggtggtgtctccacagtagtcatggcctctaccacctccttcactttcaccttggatcttggcctgtcgacttcccgtgtgatgtgggtcatgccagccttgtatcccaggaaggctgtgacgttgaccagcttggaagggtcatccttagggaagctcttcaccttcccacgttgcctatttcttcactcctatggcaggaagcagagggacccatgtctgggagtggagaactttctgtgagacatcacacaatcaaattccaccggtagagctctccctgtggttttgatttgcatttccctaatgactaataattttgagcaccttttcatatgctttttgggcatttgtgtatctttttggaagaaatttctattctaggcctggcgcggtggctcatgcctgtaatcccagcactctgggaggccgaggccggcagatcatgaggtcaaaagatggagaccaccctggccaacatggtgaaaccccatctctactaaaaatacagaaattagctgggcatggtggcatgcacttgtagtcccagctacccaggaggctgaggcaggagaattgcttgaacccgggaggcagaggttgcagtgagctgagatcgtgccactgcactctagcctgggtgacagagtgagactctgtctaaataaataaataaatatatatatataaaattattatttatttatttataattatccagccgtggtagtgcttgcttgtcctcccagctacttaggaggctgaagtaggaggatcgcttgagcccaggagatcaaggctgcagtgagcatgatcatgccactacgctgcagcacgtagtgctgagtgacagaacaaaaccctgtttcaaaaaaaaaaaaaaagacataactttgttagagttgttacctgaggattcccatcccaagggtctcctcttggatctcatttcttgttccctgctgctgtgattaactgttgagtttaagcagccaccttgaagaatttgcaagatacggttgggacaaaggtgatgctgtcagtccctacctctgctttgcctgaggccgctgacattcatggagagctcactgcgtgctaaggagttgacgtgcattattgtataatacttaaaatgtatcttgagatccgtctcaggttcaaccacttgtgcaaggccactgccagccagtggcagagagagggctcagaccccgaccagcctggttccaaggcccatgctcatgagcagagcctccagccttcttcatgtcagtatctgtatagcttacgtaaggggaaagggctgtgcttctttgctgccagggaccctgtctccatcacccaaatgcagtaggcgcaattattaggcccattttaccgatgaaggctaacctacttgcccagtgtcttatggcaactgagtggttattatggattgaattttggcctccgtgaaagaaaccctggagtcttaacccttagtacctcagtatgtaacttgatttggaaacagcatctttacagagctaatcgagctagaggaggtcattagggggtggccctaatccagtgtgactggtgtcctgatgaaaaaggggaaatgtagacacagacatgcatgagggaaggcaccatgtgaggatgaaggcagagaccagaaagatgcatctacaagccaagaagtgccaaagaatgacagcaaactcctagcagcggggggagaggcacgggacagattgtctatgcagccttcagaagaaagccgctctcttgacaccttgatttcagacttaacatgagagaatacatttctgttgttgaagccacctggtgtgtggcacttcgttatagcagccctagaatgctatgacagtggtaggacaagatctgttaacacctcagtgctggggataaggcattgaacactaagcccctgctctcatggaaagaaatgacgctttcttggcgagagacagacgacagatgactgtgtgatgtcagatgctgaatgctaagaagaaaaataaactggggaagtggggtatggaggaaggaggagggagtgctattttagacagagaggacactgacagcgtgaccttaaagcagaggttggggtgaagtgagcaagctggtgggaagggcaatctggggcatgggcctgtgtccaaggcatgggaaggggacaggagtagccagaggacagagtgaccagagatacagcagggtcaggccactgataggattttgctctggcggggaggggaagccactgagcttcctcccagggaggctgtgagcaagggaacctctgcctcacccattccaagaattccccgggccgtcagcaagcacaagagccagtgtggatgcccgcaccattaggcctgagatcagttcctgccgttactggatgtggagggtttggatggtgctggagggagcacatcttgatcagcatcaggaatacttggttctgtgaaacttgcaacttctgcattcaagggtccctgataggagttggtatgaataaagaattttcttcactgggtgcagtgatgcatgcctgtaatcctagcactttgggaggctgaaggcagaaggatcacttgagcccaggagtttcagaccagcttgggcaacatggcaaaaccttgtctctccaaaactacaaaaattatctggccatggtggtgcacacctgtagtccagctactcagaagcctgaggtgggaggatccctggagcctcagcctggagctcttgcaccactgcactccatcctgggtgacagagtgagaccctggctcaaaaaaaaaaaggaatttttttaaggctttggtgatcgtcacatttcttggacttatgcacagaaattcagtgagtaagagttgagagttgggcggggcgcagtagctcacccctgtaatcccagcactttgggaggctgaggcaggtggataacctgaggtcaggagtttgagtccagcctggccaacatggtgaaaccctgtctctattaaaaataaaaaaaattagccaggcatcgtggcgaatgcctgtagtcccagctacttgggaggctgaggcaggagaatcgcttgaacctgggaggcagaggttgcagtgagccaagattgcaccactgcactccagccttggggacagaggaagactctgtctcaaaaaagagttgagagttgaattagcaaaattctttataatacagatttaaacaatgatataggacacaaaagcttagggtcaacattcttttttttaaggtaggtaactaaatgttataatgcataaaacttagatttggaggagaagactcatccagtcaacccttttttcaactaagaaaactggttcccagaaggtcttggtatgtccagctgtagacagattctaatggtatcattttcaaacttgctcaatgtttcagcatcatttttagaatttttctgtgttagagaatagtttatctttttttttttttttgagatggagtcttgctctgtcgcccaggctggagtgcagcggccccgtcttggctcactgcaagcttcgcctcctgggttcaagcaatcctcctgcctcagcctcccgagtagctgggactacaggcgcccaccaccacacccggctaattttttttgtatttttagtagagacggggtttcaccgtgttagccaggatagtctcgatctcctgacctcatgattcatccgcctcggcctcccaaagtgctgggattacaggcgtgagccgccgcgcccggcccaagaaaaacattttcatcaagtgcccttttgagccctgaacccaggtgctctaccaagcctgatttacagctttgattttggaagtgaaggctaatagaaataaattaactctggatttaaaaatcttatcattaaagctctttaaaaaaaaaaaaaagttataatggtcctaaatgaaccagttttttttgttttttgttttttcgctgcttttatctgatgacacactacggtttcacagagcagccatgaacaggaagggcagcatgaggtctgtggtgtcacacagttcagcttccggagtcttcatcagttagctacaagcacctcctgtttaaagcagagcctcctgatggtgtgtttcagaattagtgctgcagtgtggtgggaagaacacgggttggagcttggagacctagtgaactactccagccctttacagatcggctgcaagaactctttacctaaaaacttggtgagaggccaggcgtggtggctcacgtgtgtagtcccagcactttgggaggccaaggtgggtggattacttgaggtcaggagtttgagaccagccttgctgacatggcgaaaccccgtctctactaaaaatgcaaaaattagccgggcgtgatggcaggcacctgtaatcccagctacttgggagactgaggcaagagaatttctggaacctgggtggcggaggttgcagtgagccgagattgcaccactgcactccagcactccagcctgggtaaccaaaaaccaaaataataaataaattaataaaaacttgggtgagtccaacagaatccttcttctttttttgaggctggagtgcaatggcatgatctcagtttactgcaacctctgcctcctgggctcaggccatcctcctgcctcagcctcccaagtagctgagactacaggcatgtgtgcgctaccatgcctggctaatttttgtattttcttttcatagagacagggtttcactatgttgcccaggcaggtctcaaattcctgagctcgagtgatcctcacaaagtgctggaattataggcgtgagccaccgtgcctggccgggatcctgattttttacccctgcctgaatcaactcctcttccctgttgactagtattagttcacataaatcctcttcagcctggagtctgtgttagtctgctagggctgccataacaaaataccactggcagagtggattaaacaacagattgttttgtttcacagttctggaagccagaagtccaatatcaacgtgtcggcagggttggttcttctgaggcctcgctgcctggcttggagatggtgtcttctccctgggtcctcacaggatcatccctctgggtgtatctgtatccagatttcttcttcttcttcttttttttttttgagatggagtctcactttgttgcccaggctggagtgcagtagcacgatcttggctcactgcaaccttcacctcccagattcaagcgattcttctgcctcagcctccaaagtagctgggattacaggtgcctgccaccacagccagctaatttttgtatttttagtagagatgtggtttcaccatgttggccaggctggtctcgaactcctgaccttaagtgatccgcccgcctcggcctcccaaagtgctgggattacaggcgtgagccaccacgcctggcccagatttcctcttcttacaaggacaccagtcagactgcattagggctcaccctaactgcttcattctactttgattacctatttaaaaatcctgtctccggccgggtatggtggctcatgcttgtaatcccttggcctatgggaggccaagatgggtggatcacttgaggtcaggagttcaagaccagcctggccaacatggtgaaatcctgtttctattgaaaatataaaaacgagctgggtatggtggcgcatgcctgtaatcccagctactcaggaggctgaggcaggagaatcacttgaacccagaaggtggaggatgcaatgaaccaagatggcactgctgttctctagcctgggcaacagagtgagactctgtctcaaaaaaaagaaagaaaagaaaaagaaaaagaacctgtctctaaatacagtcccagtctcaggtggaggtcaggaagggctttgccataggagtttgagagggatacagttcagccatgacagaatgtgatgaggaggtgcaggctgtctctccacctgtcacctgtttacaaagctgatctctggtagaagcccagatggtcttttatcacacaccttgtggaggaacagaggaagtgtgatttctttagtcttgttcttgatccaggagcccagtgaggagcttcgactttggggtgtgtgtgcgtgtgtgtgtgtgtgtgtgtgtgtggtgatacagttaagcacccagaactgctgagtcaggaaagcgttccaggtgatttgtgccccctccaccgcatgccaagagctctgcaccagcttatttatggggcactgcattgtgggggtatcctacatgtctgctgggggtggccctttcagccttcctcccccactggagccttggtgctgctgccacagttgactctgcactccttatccctgctggccagaccctgcatgctcagtgcctagaacaaggctacgagccctgccagcctccttgtgtatgagctgcatctttcagcctgcagggtgcctggtttcatctcagcatctcacttgtagggcatcctctgttagagcgtgacacctaaatttggggctatgattttagccattttctagcaacctttgttctgatgacctctgtggctatgaccgtgagggtggaggtggccaggtaagtgcagggccagggtcatcgtggaatgataagggcctgaattgccttctgagaagacaccaaatggaaaggatgctgttgatgggaattcttgactggcttcacgttaaactagatcctgtacctctgcaggagaggggccagcccagcatccatttgtctctggcagtgtcctgatgctcttggcaccagtatttagaagatgcagatccaactcccgtttttttccctcccctcccctttcttttcttttttgagacagagtctcactctgtcacccaggctggagtgcagtgacccaatcttggctcactacaacctccacctcccaggttcaagtgattctcctgccccaggctcctgagtagctgggatcacaggcatgcgccaccacacctggctaattttttttgtattttttgtagagacagggtttcgccagactggtcttgaactcctgacctcaggtgatccgcctgcctcgacctcccaaagtgctgggattacaggcgtgagccaccgtgcccagtcctaactcccatttctaaggtgtggcaaaggctgctgaatcctttgctgtcgttctgttgtgggtgccatgctggggctctgatgatgttgcagcttcaccccttaccccaggttatctgaaggagctgagggtgttcaagagcactgctaccccaggcttcacagcagcctcagtgagggccactcacactgtaagatcgagatggtctttttgaaaagagcatttctctttgctgaaaagagtctgatatgcttttcgataatttgtagccaggatagtctatttactttgtgtttgagtgaaggaatatttttgccattcttcctttcaggtctgctgtggggctggaggtagtccagatttagagatgaattattcctccagtgctgtgatttgaatggctcttccaaagtccatgctgaaacttaaccccaatttgacaatattggggttgggggggcctttaaaaggtgaccagaccatgagggctctgttctcataaatgagttactcgacgtatggattaatgcattgataggttatcctgggtgaggaactggtagctaaataagaagaggaagagaggcctgagctagcattagcatgctcggcctccttgccatgtgatatcccacaccacttcgggactctgcagagagtctccaccagcaagaaggccctcaccagatgcagccccttgagcttggcctctgtaactgtaaaaagtaaatttattttctttataaatgacccagtttcaggtattctgttataagcaacagaaaatagactaaaatatccagcaatctaacagaattgagtttatagataagggaaagggtttgtgacccacctacactatataaattctcccaagaaagttaggagctagaaactccatgtcacgccttggtgtggaaggtgctgtggactgaattgtgtttctccttctcccctcaaactcatatgctgaagtcttaaccccagtgtagctgtatatcaaggtaggatctttggcagatggtttaggttaaatgaggtcatgaggatgagaccctaatttaataggactgtggccttataagaataggaggagggcaggcacagtggctcacacttgtactctcaggactttgggaggctaaggcaggtggatcacttgagcccaggagtttgagaccagcctggacaacatggggaaaccccatctctacaaaaacaaacgaacaaacaaaattagcctggtgtggtagcatgcacctgtagtctcagctacttgggaggctgaggtgggaggtttgcttgagtccaggagtctcttaagaaaaaaaaaaaaaggaagaggaagagacagacttcctcccacctcccaccatgtgaggacacagtgaggagatggctgtctgcaagccaggaagagagctgaaactgctggcaccttgattgcggactcccaacctacagaactgggagaagtaaatttctgttgtttaagccgcccactctgtggtattttgttatggcagcctgggccaactaatacagaaggaactaagttaaacttgtatttttcagaaaaaaagcaactgtttgaacaggaataccaacattcaagcttgtatttgagtcacatacaggcattcccatttacctatcttttaaaaatagtcttttccttttaaatttctttccaactttattgggcatacaataaactgcaagcatttagaagtgtataatttaaagagttttgacataacgtttatccctgtgaaaccatcaccacaatcaagacaatgagcatggatctgtcacccccagaagtttcctcctgtccttttgtcgtctccctccctcccttgtccccagacaaccactgatctgttttctgtcaccatagatttgtttgcattttctgaaagtttatataaatggaatcccacagtatgtgccgtctctctccttttctggtctggcttctttcactcagcaaagctacttcgagagtcattcaggctgttgtgtacatcaaagtttccttcttttttactgctgagtaagagtccatggatatatacaatttctttatccatttcccattagtggacatttgggttgcttccagtaggtatatgtttaattttttaagaagctgccaaactgtttgccaaagtggttgtatcattttacattcccagctgcagtgtatgaaagctccagttctcccccatcctcttcaacacttggtatggtcagtctttttcactttggtcattttaatgagagtgtaatactctcttattgtggcttttgcattttgtacatgacagatgattagaaaatcagtaagtggtcattgtaactttgttttaattccatagacacataacataaagatcactgtaagaatcttcactgttttattgtaggtaatagcaaaaaattgggagtgaccacccctggtaggggagtagttgtgaagtgagtcatggaacgacaatataatgcacacacagccatggaaccaagtagactggtagttactaacatgaaaaatgcttattataaataagggggaagaaaggacaggcgaacagtttacatatagcccactcaatcttgtgtgtgtgtgagagaaagggagggggtactgtataggagtggacaagatctcgaagccccttattgtaggactagtgtatttccagtttttcacgactctgaataaagctgtaatgaacatctttacgcacgtggctatttttgttaagataaattgctagaggtggagtagctgggtcagtggacgtacagtgaagcctctggacacaggggtatgtgctggcctgcctttgcccctctcctctgcctgcacagatgccagagccacagcctgtcacctgctgtactttgtcatgtgtttatctagcaggaccacattctctatcccaatcttgtcactcttctgattccagaatttctccactattcccatgttgggaacattaggataatttataaagttaaaaaaaaactagagggggttattgatattaaccattataggtaataacaatttagattattctgggaagaagtgacatctttacacacttgggcccttccatatagaaatgtggtagtttccatcattcattaaaatgtactcactttgctggccgcggtggctcatgcctgtaatcccagggctttgggaggctgaggcaggcagatcacctgaggtcaggagttcaagaccagcctggccaacatggtgaaacctcatctttaccaaaaatacaaaaaattagctgggtgtggtggcgcacacctgttagtcctagctacttgggaggctgaggcaggagaatcacttgaacccaggaggcagaggtcacagtgagctgagatcaggcctgggcaatagacggcgctccagcctgggcaagagtgaaactcggtctcaaaaaaagaaaaaaaattgtggctgggcacagtggctcatgcctgtaatcccagcatactgggaggccgaggcggggggatcacctgaggtcaggagttcgagaccagcctggccaacatggcaaaaccccatctctactaaaaatacaaaaaatagctgggcatagtggcgtgcacctgtaatcccagctacttgagagactgaggcatgagaatcgcttgaacccatgaggcggaggttgcaatgagccgagattatgccactgcattccagcctgggttgtcagacagagtgagactgtgtctcaaaaaaaaaaaaaagtattcacttatgtccttaagagttcttcttaaataagaccttcctgttcctcaagtatattaagtattttatacatgtgtttttgctattgtgaatgggattattttcctcaggtagacaggtataccgtcaaccaatactgatttgtatttttttctaatattttgctagcatttcctggaacagtgttgaatagcaatgttgctatcagtgtgttaaccacggtaatgttggctgctataacaaagaagtccaaaatcaatgtcctcgatgtaattgaagtttatcctcactcatgtatcagttaagcatgttattcagatgggtgggcagctctcttctacacggtcattccagaaactcaagctaggactctgtcttcttttttttttttttgagacagtgtcttgctctgtcagtcaggctagagtgcagtggcacgatcttggctcactgcaacctccgtctcccaggctcaagcaattctcctgcctcagcctcccgagtagctgggattacaggcgtgtgccaccacgcccggctaatttttgtatttttagtagagacggggtttcaccatgttgaccaggctggtcatgaactcctgacctcatgtgatccacccccctcagcctcccaaagtgctgggattacaggcatgagccaccacgcccggcccaggactcttgtcttcttgaacacgtggctttcacagttcctcttttcattgccattctgtcccacaggaaaagggaaggacacagagaagcacacatactgaggttttaaccagccaggtcctgatggcacgtgttatgtccacccatgcctcccagggagactgggcagccatggcccagctgcagccctaactgaagaagaagggagccgtgatttgggtgggctgggcccagtgcctgcactcaccttccatttaatggaagggtctgtagtgtttcaccatcatctctaccctgtgacctccctctgtttcttgtgtcataaaggatcagtttattccttggttactaactttaataactacttatctttatatggcaagaaaggcatgtcatttcattacctgatcaacatgtaaagtattgaattgctttttaccaagcatcacagttctgccttatatattactcttgtgtttgggggtcattcttgtacttaggctagattttcccaatgcctaggatgtgcctgggaagcaaatatgttggaggataatctaattccgatttgtggaatgcaggaaggagcccggaattggagcacctggggtcatgttcagactcaccatttctgagattggggcagatgcactggttacccaccgataaccattctgccctcttctttcttgccaatagagaaccccagttatatttggggatcaggtggtgatgcgctgcagggtgggggccccagcagtaaatgttattgttctaggacttcatcctaaaaatcctgctttccttggcagggattaatttcgaggtgggcacatgacctgctctagcccaatgagatatggcgggaaggctgcagggtggcttctggaaaggtttttttctcatacaaagagacaaaaaggaacacacactgccacgacagggaaagataggttaagagtcaattcactggcagggcgtgctggttcacatctataatcccagcacttggctgaggcgggaggacagcttgaggccaggagtttgagaccagcctgagcaacatagccagaccccatctctacaaaaaaagttaaagttagccaggtgtgacggtgtgtacctgtggtcccagctagttgggaggttgaggcaggagaattgcttgagcccacaaggttgaggccacagtgagccatgtttgcacaactgtcctctagcctgggcaacagagcaagaccttgtctaaaaaagaagagtcaattcatcattgacagcatgtaaggcaccagaatgcttggatcttttggggatgtcactgagcccttgcaggaaccaaatgcagaaatgagctcctttagccctggtttcccagccttggcatgctgtggcatggcagacattctggctgcgggtgggtggtggtctgtgcactgtaggatgttttcttttgtttaagaggcagggtctcactatgttgcccaggccagagtgcaggagctgtttacagatgcagtcatagctcactacagcctcacacaatcctctcgccttcgcctcctgagtagctgggatcacaggtgcgcgccactgtgcccagctctctgtaggatgcttattcccatcctggcctccctgacttctgtccagtagatgccagtatcaccccctcctccacccaaagttgtaacagccagaaatgtttccacacattgccaaatgtcccctgggggcaaaatttccccagttgagaaccactgctgtagacctttggttttgtgaggcaatacattgcttcatttaaacctgtatggcttgatggtctgttctttacagccacacatgtcctagctgagctcacaaccctggaccatcctcaacccgagagccagagcctgtttcttctgcaggctgacgtggacgtacttgtctgttgacagtaaaggtattttgtgcatccttaaaagatgcagtgtcttgcagctgttggagtggtttctggctgggagcaggacgcctacagagcagttgcagaggaccttctgtctccccatggcggaggcaccattccaactacggaacctttgttgtgttttggagggggtcgtgtgcttccagcacctgccgcctctgccagccacagcactctgcctctttgttctgagtgcccgggacagagttgtatagctgctgccttttggagagaggagtcagctttgggcttgaatgtatctggagatagcccagctttcatgccatcttcacatttcctgtgtacatggtttcttttttttttttttttagatggcgtctcactctgtcgcccaggctggagtgcagtggtgcagtctcaactcactgcaacctctgcctcccaggttcaagctattctcctgcctcagcttcccgagtagctgggactacaggtgcgtgccaccacgcctggttaatttttgttttttgctttttctattttatctttttttgagacagagtcatactctgtcgtccaggctggagtgcagtggcgtgatcttggctcactgcaacctccggctcccaggttcaagtgattctcctgcctcagcctcccaagtagctgggattacagatgtgcaccaccacacctggctaatttttgtatttttattagagatgggatttcaccatgttggtcaggctggtctcaaactcccgacctcaggtgatccacctgccttggtctcccagagtgctgcgattacaggtgtgagccaccacgcccggcctaatttttgtatttttagtagaggcgggtttcgctatgttgcccaggctggtcttgaactcctgacctcaagtgatccacccacctcggcctcccagagtgctgggatcataggcatgagccaccgtgcccagcccctgtatacactgttgcggccccttcccacccagctgccgagagatggttctttcacaggtctcctgcttccgtgcaggtagcttattccagggacagggaagcaggaggaaaaagcactaggaggaagaccgcagactggattcagaacaggctatcgtggagagctgtgtgcttcgctgccggcctgaggctctgcgttcccctccttggtgctcaggctgcccggcatacgcagcaagtgctgacccagcaggcagcccacgtgcgcttcaggtgtgggaggctctgcgggctgcggggaacaggatcgctgtgggaggttgagcctggagctctgaacagccactctgcgcccaatctgctgtagcgctgagggtcaggaaggcctctgggagttctctagaagaaggcgctggggaggaggagttaacatctcatttcattagagcatgccagttctgttctgggtgtgacttttgaagaatattgagttctaccagtagaactttggggactgaaacctgttgaggatttgtagtaagactgtgtcccgaaggcgttcttccttttcttctgtctctgactttaacaagcaggtttccctataagctttggtgtttgttaaacagatcatttgtatgtgcaataaaatatgtttaaaaattagaaaaataacatctcccgatactatgttattttatatttttaatggtatgattacttttatttgattttctggtttgtgatgataaatgcataagaatggcagtgttctctgcatcatgtacatttcaaggtgtagactgtgttctgaagggagagtcggccccacatccttaccttcttttcctgtggtttattgcagaactcagctgccttcacctcctcctgccatttttcatcacttctgagactgttagctcttagaccccccaaatagaacagtttcctttgtgagcccctattatatgcttgccaccattgtttttcaaacctaggatcctccaaactcagtgccactcagcctcttctactgatgaagaaactggagttcaaaggcttgcttgcagcttcccaggtgtatgacgagtatttcaggtcggccagcgccttgtgaagcccacactccagggttgagggcaacatgtaacaatgtcagggaaggctgaggaagtgctgtgccatcgcaaaagaataaaatataagtctagaaatgcggaaggtactgtacagcatcacagctacctaaacttcctctatgggaagacagggaaagtaggcgttagtggcaagacagagtggctttgagtctaagtgtcataataaactctgacggggaaaaataaggggcagcatttgcacatgtgtgctgcagattacccgctgtgaggcagcggtgagtttgttgccttgtgttttaaaaagtaattttctgggccgggcgtggtggctcacacctgtaatcccagcactttgggtggccaaggcaggtggatcacttgaggtcaggagtttgagaccagcctggccaacgtggtgaaaccttgtttctactaaaaatacaaaaattagctgggcgtggtggcgggcgcctgtaatcccagctacttgggaggctgaggcatgagaatttcttgaacccaggaggcagaggttgcagtgagctaagattgcgccactgcactccagcctgggcaacagaacgagacttcgtctcacaaaaaaaaaaagaagtaattttctgatctagcatgtggattcttgagtcatcttaactaagagattgggagcagcctgtgtggctgacaggccctattgctcatgacttgtgtatgtgtacacgtgtgggatgtgtgtatgcatgtgtgtatatgtatgcagtgtgtatgtgtggagtgtgtgcatgtgtgtacatgtatgcatgtgtagagggtgtgtgtgtgtatatgtatgggaagtatgtatgtatgtatttgtgtgcctgcatgtgtggacatgtgtacgcatatccagtgttaaccctgacacactggggaagtggaaatagaatgaataccctgtatgtttcagctcctttttgagtttatcctgcacgaccagcttatgagtaggtgatggtatatttttggtcacctacagcacttcctcagcctcccctgacatgtctacatgttccacccccacccccggagtgtgggctttgcagggcgctggcggacctgaaatactctgcacacctgggaagctgcaggcagacctctgagctccagctcgttcttcagtaaaaggggctgaatggtgctgactttggaggattccaggtttcagaaataatgggtgagaaagcagagcctcagagctatcaggtgacttgtgacaggcttgctcagatgagagctggagcccggactcggacccaggcctgccactcagagcctggcctctgtcacagttcccctcccattgactttcggggcccgtcttaggagctcgaccggcggccagcaaaacattccctccacagcagagccacctctgggtaaactgataaaaatgagcttctgaacctgccaaggtgccagggctcaggccttggcttcagcaatgtcattcccccagcagacggtgagtgggtgccagccacagtcaagcacccactgtgctcttcccccaaggcctggcctgggttagctggctgtcctgcccctcccctcccctcccttcccctcctctcccctcccttcccgggggagggtgcttgactgtggccagcgcccattcatcgtctgtggggagaatgacattgctgaagccaaggcctggctttcgacaagagttttgctctgttgcccaggctggagtgcagtggcaccatctcagctcactgcaacctccgcctcccaggttcaagtgattctcctgcctgagcctcctgagtagctaggattacaggagaccactaccacatctggctaatttttgtttttttttagtagagatggggtttcactatgttggctaggctggtcttgaactcccaacctcaggtgatccgccttcctttgcctcccaaagtgctgggattataggcataagccactgtgcccagcctatttattttattttttattttatttttgagacagggtctcactttgttgcccaggctggagtgcagaggtgcgatcgtagctcgcccacagccttgacctcctagttccaagtgatcctcctgcctcagcctcccaagtagctgggactacaggtgcacatcacatgcccagctaatttttgtattttttatagagacagggttttgccatgttgctggtcttgaactcctgggctgaagcaattcacctgcctcggcctcccaaagtgctgggattacaggtgtaagccactgcgcctggcctgcttcttttttttctgagcatgcttttaaaatctctagtaggtgatacacccagccttcagttctactcctactcaagcagcatggtaattttaagaaaattttaaaaggaaaaaaaaagcatattctaatgtgtcttcttacctgatgcagaagatggagttagcctgagtgacccattccttgctagcagctttattggaagctgggatttgggtatgtggataactcatgctgagagctgattaatcacgtgcatggccctgttagggttcaactgacttaggtaaatacaacacaatgatatttcagctgtgacctttcagagaaggaagctccttgtttacataggagttatagcagcactgctctcccagttcaacaaaaactggtctcactggttacctgtggaaccccgactccctgagatggctctcggcagccttgccttctgcctgtttctccagcttatctcttgccaccgccactccctcaagctggcaaagcaaccgggtcatgccatttcagtcaaggtggaatgccacaccatgagcacttgggaagtcctggccaagtgctggtctgttccattttcgtcctgtctaaagggcactaacagtgccccctggcaggtgcttcactgagcgtttgagcctgtgtcacctggcctccctgactcactgtgccactgtgcagcttcctttcagtggcatgaaaagaacacccttacaaagatgcctgacttccagaaggaagacatgtcagtgtttcaccgtgaaaaatgcaactcctcgtttgcttggtgggagacgtgcttttaaattggctgacttacatttctttctagacaaagacatctggcattctgaagtcagcattgtactctgtgcaaaagtagggtgactgtctcttctaggaacttttaaaggaaacatttaacatttttattttacgggctaaataaagcgttttaaaaatgaaacataattctgtccactccccacccatatggttaaattactccttttttaaagcattttaaattgtggtaaaatacatataaacaaattgtggtaaaatacatataacataaaatttaccatcttaaccatttttaagcatattaacttgtgtccatgtgtagccttttggaatttttcatcgtgttccctacacagaatgcttctaaatcatgccgtgtcctggggactgtcatactgtcaggttgtgtaaagtcaaaggaaacaaagatattttcttgggtggagcaacagtgacacttcctgatttctattaagcttggatgtagtttgaatctttttttttcaaacatactttatacttaacattttagtattttcttttaaggtcagcctactgagcctatgcatataatgaggtcaaaaatgttacaattatgtcctaattatagctcaaggaatgcttttagaacagtgtagttcctgagtgaaataaataagaaagtttaatttcctgtttaatcagtttctcctttttaaatttttttagcactttaaaaagtgattttgaaggctgggtgcagtggcttacacctgtaatcccagcactttgggaggccaagacggtggatcacaaggtcaggagttcgagaccggcctggccaatatggtgaaaccccgtagctgggcgtgctggtgcacgcctgtagtcccagctactctggaggctgaggcagcagaatcgctagaacccgggaggtggaggttgcagtgagctgagatcacaccactacactccagcctgggtgacagagcgagactctgtctcaaaaaaaaatgggattttgggttaggcacagtggctcacgcctgtaatcccagcactttgggaggctgagacaggtggatcacgaggtcaggagtttgagaccagcctgaccagtatggtgaaaccctgtctctactaaaaaatacaaaagttagctgggcgtggtggcatgcacctgtagtcccagctacctgggagactgaggcaggagaatcgctggaacctgggaagtggaggttgcagtgagccaagatcacactactgcactccaacctgggtgacagagcgatactccgtctcaaaaaaaaaaaaaaaaaatgattttcagctgggcacagtggcttacacctgtaatcccagcactttgggaggctgaggcaggcagattgcctgaggtcaggaattcgagaccagcctggccaaaatggtgaaaccccgtctctaataaaaatacaaaaaataaaaattagccaggcatggtggcacatgcctgtaatctcagccactcaggaggctgaggcaggagaatcacttgaacccaggaggcggaggttgcagtgagccgagattgcaccactgcactccagtgttgggggacagagtgagactctgtctctaaataaataaattaattaaattaaaagtgattttgaaaacatggccatttttcctggccagttcatctctttcttttttttttcttttcgagatggagtctcgctctctcactcaggctggagtgcagtggcgcaatctcagctcactgcaacctctgcctcccgggttcaagtgatcctcccacctcagtctcccaagtatctgggattacaggcctgtgctactacgcctggctaatttttgtatttttagtagggacagggtttcgccatgttgcccaggctgatatcaaactcctgacctcaagcgatctacctgcctcggcctcctaaagtgtgggattacaggcgtgagccattgtgccccacctcagttcatctatttctctgtgatatttattctatagttgcagaagaatatttctcatatgatacgtatattaagcttactggccagccagtttgggtttctggatagtgaaactgtcctggaagtgtttgctgagcttttcttgctggagaagattcttggcaaagcctggatggaggatggagatgagaaaggtagtgtgagggtggcacacctgttttgtgctaattccagtcttggcagccctggacctgccgggagagggatgacagtgacatgtggcccagtttttgctcagagaaggaaaagtcaccaagaccgaccatgagggcaggagctcttgcttctcctcctagatgagagttagaaggaatttgagagcaaggcttctttcttgggatccaaatacttcttaccttggagttttcctagccgtggctagtgggtcataatgtcagcgacattgccaaatgggagcggaagagtgtcgttgggggaagggtgaagacgctgtcagagaataagacataccccactagaactttaaaaaacaagtcagaaaaaaaaaaaaacaaaaaacagaaaaaaacccacatacccacacatacaccctgaagagggaatcaggagtttgcaagccctagaaggtagttattgtggtaattaaagattgaaagctcactctcaagagagctgcaccaaatccctgggctgcctcagggtttgctgaaatgagtcccactcttctctggtcagttcagtccaggaggggctggcgtgcaagtgtcactcaagaattcatggctaggctgggcgaggtggctcacgcctgtaatcccaacactttgggaggccaaggcaggtgaatcacttgaggtcaggagttcgagaccaatctggccaacatagtgaaacctcgtctctactaaaaatacaaaaattagccgggcatggtggcacgtgcctgtaatcctggctacttgggaggcggaggcaggagaattgcttgaacccggaaggcggaggttgcagtgagccgagatcacaccactgcactccagcctggcaacagagtaagactctgtctcaaaaaaaaaaaaaaagtttatggctcttacagccttagccagcaagagcaattgccatgaaacagcattatttcttttctctttatgctattgtggtaaaatacacatggcctaaagttgaccattctaaccatttttaagggcacagttcagtggtattaagtacattcatattgtgtatcctgccatccatctccagaaccttttcatcctcccaaacagaaacttccagatggagtcctaccgaattgcccaggctagtctcaaactccttaggataactttcattcttggctgggcatggtggctcatgcctataatctcagcactttgagaggctgaggtgggtggattgcttaagctcaggagtttgagactagcctgggcaacatggcgaaaccccatctctacaaaaaatatagaaatcagccaggcgtggtggtatacgcctgtagttccagctactcgagaagctgaggagggagaattgcctgggcttgggagattgaggctgcagtgagccaagatcacaccactgcactccactgtgggtgacagggcaagacactgtcaaaaaaaaaaaactaccaaaaactaattttcattctttttttttttttttgagacaagagtcgcccaggctggagtacagtggcatgatcacagctcactgcagcctcaacctcctgggctctggtgatcctcccacctcagcctcccaggtagctaggaccatagccatgtgccaccacacccagctaatttctttgtatttttttagtagaggccggtttttgccatgttgcccaggctggtctccaattcctaggctcaagtgatctgtccttcttggcctctcagagtgctgggattacaggtgtgagccactatgcccagccactttcattcttttttttttttgaaatggagtctcactctgttgcccaggctggagtgcagtggcacgatctcggctcactgcaagctccacctcctgggttcacaccattctcctgcctcagcctcccgagtagctgggactacaggcgcccgccaccacgcccggctaattttttgtatttttttagtggagatggggtttcactgtgttagccaggatggtcttgatctcctgacctctgatctgcccaccttggcctcccaaagtgctgggattacaggcatgagccaccatgcccggccccactttcattctttagaacaaggaaattcatactgttttatctaagaaagaagctttcctaagtcctgtacttggacgagggcaccggtgttgtctttgggtacagggcattagcaattgtaaagaacagtgttgaaggggtgaataagtaatatcttttcctcatccattgcgaggttcatggctgagacccctataacgaaagagagattaacgagagaaaagcatgcaaattaagttttacatggcatgagagccttcagaaatgaagacttggagaaacagggattccaatctgtgtctctgtgcttgggtttgatgaagtgtgacagtcgcgtagaatgactggatgcgggctgtgatgattcaggaataccccggggggaatttagcaaggcctgtttgttcaggttcttcttggtgcctctgggagacattccttccctctgggtatagggcaggacgcctgtcacagggcgttcaggggagaagggagggagatcttgatctccctaggctttatgagctgcctaggctttatgagctgccacagggaggaaggtgagagtatccttcctgcttctgctgttttctcagtttcccaggtaccatattttggggtagcatttcctgcaccccattagtatccaccagagaagtttgccctaaaaatgtgctgtccctcttgtgtctggtgctggccttcagtgagactgaagggcatcacggaaaagtctcgtaaggtggaattgcggggagcccgagtgggaacctccatggtggcctttaccactgatccaagcaactggttctcccttctccactgggctacagctctgagcttctgcacaaagagtggagtctccatctttaaatattctgcttatttttcaatttgtcattatactaagaggtcatgtgtgtggattacttactttgtgctgggcagtatgctaaattctttatacatggtaactctttatgcttgtaacttcgtgaggtatcacagtcctcatttttacagatgaaacttcagcccagaaaggtaatttgcccgaacagcaaattctgaaactggaattggtggctctggtgcccaagcttgcatatttagaccaggcatcagtaatagcctcagttttgtttattgctttgttaagccttagttttgaagcacttgttaagtgcgaggctccatgtagagtgtataaacactcaatctctgtgtgacgacagctccaaggagcagtccagcaagttctgtctggccaaatctagacctggttttgattaactttgttcatgatctctagatcactctgctctatgcttgaacctgtatgcttgagtcaagcttacctctctgatgggtgaagaaaatgatatttcactgttatattaattttatttttcttaccacaaaggaaggatatctcttcatttttctaagtcctgttggttcattgcctttgcttttgctgcatttctctctctctctctttttttttttttttttgagacagagtctcactctgtcactcaggctggagttcagtggcacaatctcgactctctccaacctccacctcccaggttccagtgattctcctgcctcagcctcctgagtagctgggactgcaggcgtgtgccaccacgcctggctaatttttgtatttttagtagagacagggtttcatcatgttggccaggctggtctcaaactcctgacctcaggcgatctgcccatcttggcctcccaaagtgctgagattacaggcgtgagccactgcacccagccttcttgctgcatttttaaagaagacaactgcagcttgtctctcttgataagcagtctgagtttgcctttagtgcaccttttcttcaacagaaatcagttgcctgtctcagatgggccttgctcacattattcacatgggctgggtacagtggctgacacctgtaatcccagcactttgggaggccagtgcaggtggatcaattgagcccaggggttcgaggccagcctgagcaacatggcaaaatcccatctctacgaaaaaataccaaagatgctgggcatgatggctcatgcctgtaatcccagcactttgggaggccaaggcaggtagatcacttgtggccaggagttcaagaccatcctggccaatgtggctcaacttgtctctactaaaaaatacaaaaattagccaggtgtggtggcacatgcctgtaatcccagctacttgggaggctgaggtgggagaatcacttgaacctgggaggtggaggttgcagtgagctgagattgcaccactgcactccagccttggtgacagaacaagactctggctcaaaaaaaaaaaaaaaaaaaaaatccccccaaaacaaaaaaaaaatcagcagggtgtggtggtgcacgcctataaccctggctactcaggagactgaggtgggaggattgcttaagcctgggagttagaggttgcagtgagttgcaatcacaccactgcattccagtctgggtgacagagtgagaccctgtctcaaaaaatcaaaacatgataaacatggtcaacatacagtgaacaagttcattccacttttactggttacagcctcagttctgggctatgtgtctttttctatgtctttttcacattaaatgaagtgaggtaacacatgtaaatgagaaaaaatagcaatcagttctattaatttgaaatgagtggttgtggttccttgcaattgcgttcatatgaaaagagatctatcagtcaggatagggaaagttatgcacagtaacaaacaatcctcaaatcatggtgacttttacaacatggtttatttctgccttactggatcagaaagtagtttctgctttctgaaatttctcaggggctttatctcaacctgtgtttccataatcttagaggcagggaaaagagaagtgataagctatgagttggctttgaagatctgtgccagaagtgactcccataattctattcatcttgttggccccaagtatgtcacgttgccgtgcctatactcaaaagagcagaagaaagggatcctgctgtgtgcacagactgagggaacctcttaggaatcccagatgctccccatgggaagtacttaacatcttttttgtcccaaatagcagaagtcttagagtataatgagcaaaaatgagatttggtagtgttaaaaagagaaaactctgccttgacaaaaataatggtacaggtcaagacagcttttagctctcctgctcttgaatccatggagaaagcttgttagcctgtgatcagtaagccatgggagtcgtggaaatgttttctgcgggctggctgggcattgctggtggtgaagctggatgttggctgcctgaccgttctatgtgtttgaaattgcccatgagcaaatgtactgtttgctatccattatccacgttcattccttctctgctgctaccgtcagtctgttttcatcctttgtgacagtgtggaagttaagtggcctctcctctgttctttttttttttttcctttttggaacataagcacattttttcacattattttattagcattccctttgttttaaggtatcacattcttcataaatgatgttttaagggctaggcgcagtggctcacacccataatcccagcattttgggaggctgaggcaggaggattgcgtgagcccaggagtctgagaccagttgatcattctgagcaatgtagggagaccttgtctctacagaacaatctttttaaattagccaggcttggtggcatgcacctgcagtcccagctattcaggaggccaaggtgggaggatcactggaacctggaggttgaagctgcatggaaccatgatcgcacacttgctctccagcctgtgtaacagagtgcaacccttttttgatgaccactagttatatctgatttttttttttttttgagatgagatggagtctcaccctgtcgcccaggctagagtgcagttggctcactgcaacctctgcctcctgggttcaagtgattctcctgccttagcctcctgagtagctgggattataggcacgcgccaccatgcccggctaattttttgtgtctttagtagagacagggtttcatcatgttggccaggttggtcttgaactcctgaccttgtgatccacccacctctgcctcccaaagtgccaggattataggtgtgagccactgcacctggccatatctgattttttttaaagatgtcattttattgaatttgagaattcacttagaccacagatatctgatgaaaaatattcttgttttccttgtcttcctttcatgtcctgcataacctgagtgtgctttagaggtgggatcgtagtgtttgcgtacaagaggaaagttgtcatggccctgtggtcatgaggctgagggcccacgattctgatgtggatggaatgcagctggcattgcacatgtcttagatgctcttcccaactgcccgctttgttctaggcactgtgcagggtgctggagacagcagagaagagtgagatagtccctgccctcgcactgtagagggaaggcctgttctgcctccctgagatgggggcactgagctaaatcacacgtgaggaagagttagcaaggtggccggaagggcatttaggcaaggggcagtgaaaggaaggctggagccgtgcttgggagaccttttaagaaacgtgaacttggccagatgcagtggctcacggctgtaatcccaacaatttgggaggccgaggcgggtggatcccttgaggtcaggagttcgagaccagtctggccaacatggtgaaaccccatctctactaaaaatacaaaaaattagctggatgtggtggcgtgtgcctgtaatcccagctactcaggaggctgaggaaggagaatcgcttgaacccaggaggtacaggaggtggaggttgcagtgagccaagatcatgccattgcactccggcctgggcaacagagcaagactccgtctcaaaaaaaaaaaaaaaagaagcgtgaacttttaccctgtaggccttcagtaaatatttgtgtgagcaaatgaactacttatgcagatcattccctgataacatcagacactgtgttataagattaagccggccaggcgcagtggatcacatctgtaattttagcactttgggaggccgaggcgggtggatcacaaggtcaggagattgagaccatcctggctaacgcggtgaaaccctttctctactaaaaatacaaaaaattagtcaggcatggtggcgggcacctgtagtcccagctacttgggaggctgaggcaggagaatcgcttgaacctgggaggcagaggttgcagtgagctgagattgcgccactgcattccagcctgggtgacagagcaagactgcatctcacaaaaaaaaaaaagaaaaaaaaagattaagccatgaggggcctcccacgcacaaagttctgcccatggttactctgtgccacgaaggacagcatcgatctgttcacactctcgaccttgcttctcgggtacagcaagcactctgggatgctttcccgcagacgtgtcgtgtatcctgcttatggaagcctagcttgggactaccattgctccagcccagtggggtggtgctgttttcctcctggagaacacgggttcctcccagcaccatctccaactggtagaaatgtcaggcgtcacagcctggaaggctttaatcccaatccatatcttctgagtgagcccctactcatggcttcctgagatggagaagcacacggccctcacccatcacgggctcagaggtgtgaccgagaagctggccacctactaagaaagtccttgtgcctgcctcatctccagcgctgccagagctgctgtggactctcgccatgcagtccctctgcccctttgttgtgtatgtctctttcttacagccacactgggacatggctgcagtctctctggcttcagcagatccactctccattgtaaatatcgctgccttcttcctcatgtgttttttttgtcttgtttgacaggctcttcagagtaacctgaggtactccttgttgccaagacggctcctcatcagcaaaagattagctcagtgtttgcaccctgccctgcccagtggtgtccacttaaaagctctggaaacctacgagattatctttaaaatcgtggggaccaaatggctggccaaggacttgtttctgtacaggtgcgattgcttctctgctgtgttcctttttattacccaagtaaccggtatttcagctcacaagatgagaaaatgacaaacaggcaaaataagcgtagggctgtgtgtgcaacagtttatcataaagccatcaccaggagacgtcactgggcgccttctggagtctatccgtcctaactttgctttctttctttttttttttaaatttaagttctagggtacatatgcacaacgtgcaggtttgtcacacatgtatacatgtgccatgttggtgtgctgcacccattaactcgtcatttacattaggtgtatctcctagtgctatccctccccactcccccgaccccatgacaggccccagtgtgtgatgttccccttcctgtgtccaagtgttctcattgttcaatccccacctatgagtgagaacatgccatgtttggttttttgtccttgcgatagtttgctgagaatgatggtttccagcttcatccatgtccctacaaaggacatgaactcatccttttttatggctacatagtattccatggtgtatatgtgccacattttcttaatccagtctatcatcgatggacatttgggttggttccaagtctttgctattgtgactagtgttgcaataaatatacgtgtggatgtgtctttatagcagtttgatttataatcctttgggtatatacccagtaacgggatggctgggtcaaatggtatttctagttctagatccttgaggaatcgccacactgacttccacaatggttgaactagttaacagtcccaccaacagtgtgaaagtgttcctatttctccacatcctctccagcaccccattttgactttgctataagggaactttagcatctgaacgtgcggacagcttcattgctggcttgttacgtaacagtgttttgtgaccatctcatgtcatacccacacatcgaaaccagcagtttaaatggccagctgtttgcttgtgaaaactcccctcggctggcttgtcacctgggacttctgactgggtatcttatttctgccccgctccctctcgttctttctcgaagctgcgggttatttcctctcctggcacacgcggcggtgtcggtgaggccggtgctgctcaccctgtacgagaagtacttcctcccactgcagaagctgctcctgcccagtctgcaggccttcatcgtgggcctgctgcccggccttgaagagggctccgagatctccgacaggtgcgtgggcgtcttgtccaggctgtgtttactccactgctttataagacgcggggagggggccgggcgcagtggctcacgcctgtaatcccagcactttggaaggccaaggtgggtggatcacaaggtcaggagatggagaccatcctggctaacacgatgaaaccctgcctctactaaaaataaaaaaatttagccgggcatggtggcgggcgtctgtagtcccagctactcgggaggctgaggcaggagaatggcgtgaacctgggaggcggagcttgcagtgagccgagatcgcaccactgcactccagcctggacaacagagactctgtctcgaaaaaaaaaaaaaagacacggggaaggaagtgcagagacatgggaagcagcagtaggtgtggaggtcgggttgctctttcacatttccttggtggttgtgatttcaaattcctcccgggaatctctcttgtctctttaccaaaggggaagtcccgagcccggagagatgagatcctttaggcggagagaaatgtagctcattaataagggagaccatagtgcagggttcccatgatgtcctgtcccgttacggagttacccacagagtcaccatgtgtggagggaagacataccctcttagggcgcctagtgtggaggaaatgaagggaccctttcctgggcacttgcagcgtgcattacacacatgatcacattgtgtaatgaattcctctgctccaggagttacctccatttacaggtgagggtcagagggtaagaaggtttcccagtcgcacagtcagtgagccccacagctgggattctattccactgtatctattggattcttttttttttttttttttttgagacagagtcttgttctatcacccaggctggagtgcagtggtgcgatctcggctcactacaacctccgcctcctgggttcaagtgattctcccgccgcagcctcccaagtagccaagattacaggctcgtgccaccacacccagctaatttttgtatttttagtagagatggggtttccctctggcggccaggctggtctcaaactcctggcctcaagtgatccgcccacctcagcctcccaaagtgctgggattacaggcgtgagccaccacacacggctcatatcagattctaaagtccttcttctttccattaaactaggctgcttctaaattaaaaagcaaagccagggcagggcttgagaaggcaatttagtgtgatgtgaagcagaatatcttgacaggtttcagtagcaccttggagaaatctatagcactcatatgcacaaaagttcatgtagctttgtgtgtgtgtgtgtgtgtggtcactgcttaggaatgggagaaagtgtgaatctgttccgactattgagtatggccgggcacggtggctcacacctgtaatcccagcactttgggaggccagagcaggtggatcacttgaggtcaggagttcaagaccagcctggccaacatggtgaaaccccatatctactaaaaatacaaaaaaattagccggacatggtggtgtgcgcctgtaatcccagctacttgggaggctgaggcaggggaatagcttgagcctgcgaggtgaaggttgcagcgagccgagattgcaccactgcactccagcctgggtgacagagtaagactacgtctcagaaaaaaacaaacaaacaaacaaaaaccagactgttgagtatacacagtgacctttgtttccggagaagtataaagtaagaactcacttccagcttattaactcttctgagagatgccacagtgattcacctctgttaatgggacctgttttaagagcccatgttcagtcactggtgacttttgtgcttgtaaaagctgccatgtgattacacaacgcgctgctcatattaccctgtgctggaggccctagtcaggtcaccctttcctgtggtgtcagctgtgactgaggggtgcaggaggctggagtctaacccaggaatcaatccaaggtccatttgcacggctcccccagccttaagtaaaccaagtaatcagaatggtttgaagggttagttaggaagtggccaagggtgcatttcgtgagctctatatcaggacttgacagatgtaactaaaacattgcactttaaccatttcaagctctcacatagaccaggtgttggctctccatttcccaaaggagaatccacctttacagtttctaccttaggaggcagaatctgtctcgttgcggttttaagcccagcgccaggccctgtggctggtacacggtgagactcggtaagtgtgtgttgagttaacgagtggtccaggtcacataggaggcagctggaggacattgccagactccatgccaatggactcctaatcccaggccctttctagaagttctgctgtgtttgtgttctgatgacagatatgtgagtatacatcctacatgatttttccatcattggacagatgaacacattagttccctaaagcttactgtgatcttttaaatctgtgtgaatcacactagaagtgtaaatagttggagtgtttttgttttcttagttgataaataaaggttcatttgaacagttgctaaagttgcttaacattgattttttttctgaatattgtgatttcttgacattgaaccaagagccaagtaaagcttcatgaatcaccgaatctatttagctgtgacagaaaaccaaatgcagtgtggcacccagaagtgattagttatcagctctccaaggtggatgcaggtgaaaggttatacaataatctctgagccagtgtgttgcagccacagtaattgaagtgactgtacaagattttttggttgctatatccatttcagtctgagacggtttggtaactgttcccagaagtgcttgggtagccaggtgtggtgacaggcacctgtaatcccagctatttggaagactgaggcagaagaatcacttgaacctcggaggtggaggttgcagtgagccaagatcgcaccactgcactctagcctgggcaacagagcaagactccatctcaaaaaagaaaaaaagtgcttgggaattgagtgaaacaccccaacaaatgtgcagagagcagaaagggagggtgcagtggggggggtcatgatgagcacgtgggtagaaattgcaaagtggtgagttaggttgagctggtgaaggctgggatgactcacaggtttcatgtaggtggaggctgtccctggtgtgtgctttttagtgaaccataaggaatgaaacttttggcccctgttagaacttattatccaccctggctttctaaccctttggggtctgcagataacctatgactggtcagaaatcctttttttttttttttaagtgcccatgaaatagctacatagctgtgttttgctgtactaagaaaacaagattagaacagggaaagcactaaactcttcttctcaggagatgaggagaggtgaatgttttaaatggtttgtaagaaggcaacaactagctcaccagatatttccatttaaatcagtaattttcaatgtagtagtaattttgcctctcagggtacatttgacaatatctggagacagttttggctgtcacaactgggggtggggagggtgctactgatatttagtgggtagagtccaggagctgctgaacattttacaatgcacacaggtgccccgacaacaaagacttacctggtcccagatgtcagtggggtggacgttcagaaaccctggcttaaagagttgaaaaatatttattgacatttcttttcttttggagctcattaataagggaggccatagtacagagtttccatgatgtcctgtcccattaaagagttacccacagcgtcaccatatgaagaggggaagacgtaccctcttagggcccctatcgtggaggaaacaaatggaccctttactgagcacttgcgacgtgcatgacccacatgatcacattgaattccagggtcttgctgtgtacccaggctggagtacagtggcaggattatagctcactgcagtctcaacctccaaggataaaacgatcctccggcctcagccttccaaagcactgagattacaggcatgagccaccccttttggctgacatttctattttttttttttttttgagacagtctcgctctgtcgcccaggctggagtgcagtggcgcaatcttggctcactgcaacctccacctcccgggtacaagcgattctcctccctcagcctcccgagtagctgggactacaggcatgcaccatgacacctggctaatttttgtatttttagtagagacggagtttcaccatgttggccaggctggtcttgaactcctggcctcaagtgatccacctgcctcagcctcccaaagtgctgggattacaggcgtgagccactgcacccagcaccaacatttcttttggttggtttcaggcactgtgatcatgatctgtgctggttcgaggctttttttttgccccctctttagcgctgtttctgacctgcagtttacagtacagggtgctgttgtcactgccctgcctcttcagtttcagatgattgtaccaaagcggtgctgtcttgtgacagcttggctttccatggttgtccttttggcaagcagctgcagaaccaaagttgtggagtgcttgggatttgcggtgcccggcccatgccactcacctgctctcagttgtggagtggagcatgccagtgtcatttgaaggagctgcgtttgcaggaggcatgagagagcataagctgggatgagttaggaaggatggaaatacttggggtttggaagttgggtttttttttttaatgtttgttggttttttgtttgtttttgttttgttttttgagatggagtctcactctgttgcccaggctggagtgcagcggtgcaatcttggcaccctgcagcctccacctcctgggttcaagcaattctcctgcctcagcctcacgagaagctgggattacaggtgcgaaccaccatgcccagctaattttgtatttttagtagagacggggttttaccatgttggccaggctgatcttgaactcctgggctcaaatgatccacctgccttggcctcccaaagtgctgggattacaggtgtcagccactgtgcctggcccgtttgttggttttgaattaaaagtttagggttcccagtggggcatggtggctcatgcctgtaattccagcactttgggaggccgaggcggggggttacctgagctcaggtgttcaagaccagcttggccaacatggtgaaaccccgtatctaccaaaaaaaaaatacaaaaattagccaggcatggtggcggctgcctgtaatcccagatactcaggaggctgagccaggagaatcacttgaacctgggaggcagaggttgcagtgagccaagatcgtgccattgcactccagcctgggcaacaagagtgaaactccgtctcaaaaaaaaaaaagtttagagttctggactgtaaactgcacactaatattggaatttaacaaccgagatgatcatagtaactcttgttgagtaggaagttatttcgtttttaaccccgtttattttgctctctcataccaaaggtttgtcatagttgctgttgtttctactatgatgtcatttaaattgttagtatgcatccattttttttagaataaaatgagacttaaaaaacaaagctggctgggcacagtggctcacacctgtagtcccagcactgagaggccatgcagggtggaccacttgaagccaaaagttcaagaccagcctgggcaacatggtgaaactctgtctacatataaaatgcaaaaattagcccagtgtggcagcatgggtgtgtagtcccagctactcagaggctgaggcaggaaaattgattgagcccaggaggtcagggctgcagtgagctgtgttcatgccactgcactccagcctgggtgacagagtaacaccctgcctcaaaaaaaaaaaaaaaattatttctttaatagaaagctagtagccagttttcagaatattgaagagacaacataggcagcgtttcccatactttttgagggtggaacccctcttctgtggaacatctctagtggccagtgttccatggaacatactttgggaatatgcagttctaattaaagggggactgtgacaccacgatgtgtgcattatagtgtttgtgatgatttcagagctaggcaaagacaagctctatttgtttactcagcctttaatagaagaccaatcaataacctcagccattaaatcgccctgcctacttcttctatacacttagccattacttatgtctcttcatttttattttttctaagaagacggtaccatgcattatttcctgcaatattttacaggaagttcagactaattttaaggagaacaaaatgtacttttaatataacgcgatggtagatatttttgaaggaaatacaaaaaaattaaccgaggggtttttcgagtgccaacctggagtcacttgctcaaataggcactggggctgtgacagcaaacagagtggacctagtagtaattgcaggcggcatggcccaagcattaggtctgttcttctgggttgagttttttttttttctttttttcttttcttttttttttttgagacagagtctcactctgttgcccaggctggagtgcagtgacggcctctcggctcactgcaaactccgcctcccggcttcaagcaattctcctgcctcagcctccccagtagctgggattataggcacctgccatcatgcctggctaatttttgcatttttaatagagatggggtttcaccatgttgtccaggctggtctcaaactcctgacctcaggtgatccacccgcctcagcctccccgagtgctgggattacaggcatgagccaccacgcccagccaaacagttttttttgttttttttttttttttttttgaggggactctcacttcattctcacaacatctccacgaggtcgaggctccttcccctgtcttttagctgagcacgggcgtgcacagatgttaaactggtcctaggtcctgcatctaggaggcatcacaaccaggatctggacacgggagggccaactctggcaagctctgtgaaccaacacattccaccgggttggtttttctgattgttttttgtggtctttgcagataggaagcatgtgagaaactgaatcctttcaggtaatgagtcagatccttcgtggggtgatatcccttagggggaatgtgcctctgctgttttactggtagatgctgtcacccagcctgcagattgtgtgcactgaggacagggaaagggccgcagtcagctgcagggacaccaccgaacagacatgggcctggccttggtcagcgtcaggggaaaaacgagccctgatccactggtgacgctgcttctcttaaaaggatgcatgagaaggtgctgactttgtatcacgggagacctagataaagataagaggcgaacaaatgcccggcctcagcacaagagcccctgggagcgggagtcagcacatgcaggtgctgtgggcagactgaaaggaaacaccactccaggctgatggaatttgcagggtcgtgggaggccccaggcagatttgcccctagcatttctaaaggcagatgtcacttggcacatttttggctgtgctcaagttggtggcatctaattgcttaagtctttgatcagtctcctcagcatatgcttgtttttgatacaccaatggctccttccgcttttctgtgaagtggctgacctgcctatccctcttatggtggaacctcccttccgtgagcacctaggcatccgtggcacggccagggtggagatgggtctctgccctgccacgcacgactgcttagccactttccattggccaagacaccgcgctgcctagtgacattggttttggcaaatccagggtcagtgtgacagccagcaggtggacacacacagcagggtgagagatggcagcggctcccggcgatgaggaaggtggggcttccccagccaggcgaatccgctgtggttcttcatgcagcattcgcagagcagtgtgcagtgggactcgggaagatggggcgagcccttgaaccctatcctctctcatcaacagaacggatgctctgctcctgagactgtcgctggtggttggcaaagaggtgttttacaccgccctctgggggagcgtcctggccagcccgtccatccgcctccctgcctcagtcttcgtggtgggccacatcaacagggatgcccccggccgggagcagaagtacatgctggggaccaatcaccaactcacggtgggtgctgtgttcctcacagggcatggggaggaggcgacatgtgggcacagcatcctcatgggcaggttgtcactgaagctgcaaagggacatccaggaaagggaggtgcaccaagcttaagtctgggtaacgaacggctgagcaaggcgagaaggaggccttgtgcagttgaggctggtggtggcttttttaacatatgcattaaggttttttttgtttttgtttttgttttgagacggagtctcgctctgtcgccgaggctggggtgcagtggcacaacctcgactcactgcaagcttcgcctcccgggttcaagcaattctcctctctcagcctcccgagtagctgggattacaggcacccaccaccatgcccggctaatttttgtgtttttagtagagatggggtttcaccatgttggccaggatggtctcgaactgcctgcctggcgggtgatccacccaccgcggcctcccaaagtggcattaagattcatacattcaaataagtgttcacaccctcagaggtcccttctggaggcccctggctttgcagaaatgtgcttagctgcacacggcgctcagacggcctctgcacgcagagggtctgctgcattggcgggtctttgtttccttcctctgtcctgtgtcacgggggccactgcccactcacacatggaaaccccctcctcccttggcgtcctccccctcctctcttgtctccattggctgctctcaaacctaaattattggggtcccccaggtatccatctccaggcccttcaagggaagctctcttccctggtaacgacatcccttctcgtgcccttagaaatggtaacctcccagatctttgtctcttttccccaaacctgcctcttgtgcttttgtgtcttgctgtctttcgccacctggtggtgttcccacactttgatcttaaagtgttcagattgaattcgcaggtgagaagatctgcagctgagtgtgaattaccctctggttccatttctctttgcaaaatgggggttgtagacctgcttcacaggatctctctgatgacaaggtggaaaaatggatgaaaagcgcctcgcacaatgatcaggacacaggcgaccccgatgaacacgtccctttcctgccccgtcagtatcccctttgtctctttctctccatcgtctcagccctgctctggcttcttgtctcttactcttggatctgactggtttcttcccatcccaaatctgctaagagatttgggatggggagaaagcctagctttgctcatatgtatcctgtgctttaaaaatgtctgacttcccggctgggtgcggtgactcatgcctgtaatctcagcactttgggagccctgaggcaggtgaatcacttgaggtcaggaggtcaagagcagccgggccaacatgatgaaaccccacgtttattaaaaatacaaaaattagcctgggcgcagtggctcatgcctgtaatctcagcactttgggaggccgaggcgggtggattacctgaggccaggagttcaagaccaccctggccaacatggtgaaaccccgtctctactaaaaatacaaaaatgagctgggtgtggtgatgggcgcccgtagtcccagctactcaggaggctgagacaaaggaatcgcttgaacctgggaggcgggggttgcagtgagctaagattgcaccactgcactccagcctgggtgtcaaagcgagactctgtctgaaaaacaaacaaaaaaaattagcagagcatggtggcgggcacctataatcccagctactcagctgtctgagacacgagaatcgcttgaacgccggtggcagaggttgcagtgagtcaagatcacaccactgcactccagcctgagtgacagagcaagaccctgtctcaaagaaaataaaaaaataaaaatatctgacttcccattgccaacagctatagtccaagctcaagagcattctaaccatctgctcccagccacagcacctcactcttccctgcaggccctgcgctcccacacgactgccacagggcctggcctcacagtgcctttgctcccggctgttcccttctgtccccctggctgtgcattcctgcccttcttcgaggtctcagtgtagctccttcctgttcttcaagcccagctttcccgtggagcatcattgttctctgcagttgaaagagctctcctcttctgaactctgagcgtttgtctgtggctctaatttcttatgcatctctagtctacctatctgtattcagaaaagacactcagaatatctactgaattgatcaggaattattttcccatgtgtcttcagagctttagtttaaggttcctgttggatcctttctgggatcgtagaatttgagatcatagaacccggccatctggtccaaacccctccggctctcacgtggaacagtgaggtctgcagctgaacgtcttctccgatgtcacgcagcctgtggcctcgagagctagaacccacaccctcctgacctgtggctgctggttctcttctgagtgatataacgcaggagtttcaagattcccgggaaaggttactttcgtttttatgaccataaagagtagcctgaaaatgctagtgccgtttgatcgtttacaggtgaagtctttgcgtgcctccctgttggactcaaatgttcttgtgcaaagaaataatctggaaatcgttctgtttttcttcccattttatacctgtctggtaagtaatttgtactcttctggtaagtcactggtgtttcccaaggggtgggatatagatctcaagcagttctgtcgtacgaggacagctcagccactcatgggcattatttgctggtagccagtgaaaagtccttgttcatttttgcaaggatagcgttttcattgcacgtattgaatagcttctttccatgggtaatgtgtaaggaaccagcccattttgagatagagctttgcagaccagcaaggaagggctgcgtgtcaaaaagtcagcaatctgccctatcattcccttgcagtaaatttctctgtccttctaataggattccaatgagagagccatccccctcctcagatctgacatcgtgcgcattctctcagccgccacccagaccctactgagaagggacatgtccctgaacagaagactgtatgcatggttactaggtactgagcagtatacacccttttaaagtcaaagttaatatgaaaccttttagtgctgacttctggaataagatttggtcttggtgatgtatctctgaatcatgaagtatggaaagataccacaatgactaaatatggcactggtcagttgaggtctgctgcctacacatagcttggttattttgcagtttcttttttaaaaaaggggaaataataagtgggatttttaaaatgccaactgaattccatttaagagcttgaaataccaccaaaaagtggtagcaaaaccttattcaggtagaagcctgttgctatggagaagttccatgggatgagggtgtatcgtggagaaaacttacaaatattgtggaagatatgtagataaaggaggaggttttgtgtaagtgtaaatgttttgggagacatttggataactttggagatcacgagagcccctgggccatgtttctgtgtgtcagagtgtgtggactgcctataaatttgttggcaaagggcccttgactattggttggaaggcctcccagggacagagcctaggaaattgcaactttaaagataacacgttcatgaattttctaaagtcccatattcacgtacctaagaaaacgtatacaaaacgattgtgacaggacttaacagctctgatcaactctcaacatttagatcttttttttcctttttgagatggagtttcactccgtcgcccagactggagtgcagtggtgcaatctcagctcactacaacctcggcctcccaagttggagtggttctcctgcctcagcctcccaagtagctgggattgcaggcacccaccaccccggctgggtaatttttgtatttttagtagagatggggtttcgccctgttggccaggctgatcttggactcttgacctcaggtgatctgcccacctctacctcccaaagtgctggaattacatgccaccacactcagcctagcattcagatcttatcaaagatcttaccaaagtcaagaagtcctcttcagtccttcctgctgttctccctagttataaaactttagaaagtcattgcatggaagcttactaaggattttaagaagactatttgtaggctctttaaggatttgtatgtaaaggatgattttgtcaagggcacagctctgctcctacgggacttgatatgctgtgtggaggacactgggcctgaccacagtgccagctctggctcacttacttgcggccccaggagccccatattctttgcccataccatgaggatgcactttcttgccctgagaaccttgcagacttatccagggctccagctgatgggagcatgtgcatgagaataccttgatctcacataatgctggacaaaaaaacactggttttaaaaagtgatcctcagccaggcatggtggctcatgcctgtaatcccagcactttgggaggccgaggcaggtggatcacctgaggtcaggagtttaagagcagcctggccaacatgctgaaaccccttctctactaaaaaatacaagtgattcttctgcctcaacctcccaagtagctgggattacaggtgtgcgccatcacgcccggctaattttttgtatttttagtagagacggggtttcatcatgttggccacgctggtttcgaactcctgacctcaggtgatccacccaccttggcctcccaaagtgctgggattacaggcgtgagccaccgcgcccagccaacagggtgaattcttagaacaaactaaattgatacccattgaggtggaattctgcctgtctgatcattagccacaccactgtcagaagaagaaaatctgacgtggtctttctggatctgattttggttttccatcagaagaatgatatttttaaaaatattggagcatgagacttttgcacaatatgatgtcctttaaaagcacagctctctttacagctcggcgcttgttcttttgtaggctcagacataaaaggaaataccgttgtgccagaatctgaaatctcaaattcttatgaagaccagtcgtcttatttttttgaaaaatactccaaggatcttttagttgaggtaaaggagcatttccggaaagttcagggtatccttggtgacgattctccagtggatttctttgggaggcttccacataggcagtgagcacgttccttggcccctggtttggggaactgcagggtatttgttgcatgctgggtgactggttttccttctgtcccagagtatttaacaattagaatagccagtaatgttgttacactttatgatatacgatattctaatatgtggctttttttaaataatagggtttggctgagatattgcatcagaagttcatagatgctgacgtggaggaacgccatcatgcatacctgaagccttttcgcgtcctcatcagtctgcttgacaagccagaaataggtaatgttagaaatgctgcttctatcctatgctgaatacagattacctgttttcagggaaatacaacatggtgagatacaaccaaagcgttattttgaatataatttaatatttggaatttcacaactttgaagtcatgttatatggttcaatgatcatatctgtggtcacttacaagttttgcatggctgggcgcagtggctcatgcctgtaatcctagcactttgggaggtagaggaaggaagatcacttgagctcatggatttgaaaccagcctgggtaatatggctgaaaagccatgttgaaaaaccccatctctataaaaaaatacaaaaaaattagccaggcgtggtggtgcttccctgtagtcccagctaccaagtggctgaggtgggaagaccacctgagcccagggggtcgaggctgcagtgagctgtgattgtaccacggcactccagcctgggcgacagagtgagacccagtctgaaaaaaaagttttgcacaataatttgaacattttttgttaggaaaatacctttgagctcctatagtgtctacagaacatgtggtatttcctttttaagcctattttttcaatgtcatacttaaaatgagctttggtttgattttcaattaagtaggggaccccgtccatctttttgccttgggatcctgggcaagccacttcttttcactgtggagagtaaaaacattttcactgtaaaatgaagagggttgaactagactctggtcaccaaaggctcccttcttagatactatggtcctatgagcataggttgagaaaagtgaccttctctcactatttatttatttatgaatgaatgaatgaacgaatgaatgaatggcagagtctcgctctgttgcccaggctggagtgcagtggcgcaatctcggctcactaaaacctctgtctcctgggttcgaacaattaattctcctgcctcagcttccccagtagctgggattacaggcatgtgccaccatgcctggctaatttttgtattttcagtagagacagggtttcatcatcttggctaagctggtctcaaactcctgacctcaagtgatccacctgcctcggcctcccaaagtgctgggattacaggtgtgagccactgcacctggccctctccctcactttaaaaagaaatttgcgaccaggcacggtggctcacacctgtgatcccagcactttgggaggccgaggcaggtggatcatgaggtcaggagttcaggaccagcctggccaagatggtgaaaccccatctctactaaaaatacaaaaattagctgggcatggtggcgcgtgcctgtagtcccagccactcgggaggctgaggcaagagaatcgcttgaaccagggaggtggaggttgcagtgagccgagattgcgccactgcactccagcctggcgacagagcaagactccatctcaaaaagaaaagaaatttgcggccaggtgtggtggctcacacctgtaatcccagcactttgggaagctgaggcaggtggatcatgaggtcaggagttcaggaccagcctggccaagatggtgaaaccccatctctactaaaaatacaaaaattagctgggcatggtggcgcgtgcctgtagtcccagccactcgggaggctgaggcaagagaatcgcttgaaccagggaggtggaggttgcagtgagccgagattgcgccactgcactccagcctggcgacagagcaagactccatctcaaaaagaaaagaaatttgcggccaggtgtggtggctcacacctgtaatcccagcactttgggaagctgaggcaggtggatcacctgaggtcaggagttcaagaccagcctggccaacatagtgaaaccccattcctactaaaaatacaaaaattagccaggcatgacagtgcacacctataatcgcagctacttgggagtctgagtcaggagaattgcttgaacccaggaggtggagattgcagtgagctgagatcgcaccattgcactccagcctgggcaacagagtgagactccgtctcaaaaaaaagaaatttgctaccatatcagctcactttaaggtctgcatctgcttatgtgagccctataccagggaaaagatccccatgtcttccataggattgcaagcctaagaatgtcatttcagtgctccaggtgtacctacctcctggtagctgtttgcagaggacaagagagctgagggctggccgggtgtggtggctcatgcctgtaatcccagcactttggaaggccaaggtgggcctcacttgaggtgaggagtttgagaccagtctagccaatatggtgaaaccccatctctactaaaaatacaaaaattatccaggcatggttgtgcacacttgtaatcccaactacttgggaggctgaggcacaagaatcacttgaatctgggaggcagaggttgcagtgagcagagttcacaccactacactccagcctgagtgacagagcgagactccatctcaaaaaaaaaaaaaaaaaaaagagagctgagggcattagtgaagtggcctctctctggccttgggatggaggcccttcgcttatccattcaaaagcacagagcatctgccatgtggcagggatggtgccagctctagggggacaaaaggggagcagcttctcatgaagttagagggaaggggagactccatgttcctggagtgtttttactgttcattaataataaccatggctgacattttttgagcaattattttgtgccaagtgatttacatacatccttttatatctgtctgcacacacacctctgtccctccaacaaccccaaggtaggttctcccactatgcctgttttacaaatggaaagactaaggttgggtgggagtaggtaatttgcccagggccagtcaggagcctaagctgggtttgtcagcaccccccgatgcttgcctgattgcactcagagaagtcctacccgagatgtttgcctctgtcaccaggtgaactttattccaagagttgtgcagctctcgtcattcttaacgaaagtccaagtatgaagcttttgttcttccaggctctgcccatgatgtgctgcctcagggtgtctgcactttgttcagattcctcttcccatctgcccgctcccaccttaaaccaaatagattttcctgctagtgtagagtaactgcagctctgaaaaatcatgatttagtccaaaaagtggaacacttatataaatgtattgggagcttgctgtgtaacttcagggaagtattaaaagaagaaaatataacttagcattctggagatgtgtgttttatgtcaaagccatgcaccttggtgagccaagtaaacgttgctgctaacttggctccaggtcgtattttctggaagcaaatgaatatcacgctcctgcccaatcataacagtcacttaatttactctttccaattttttagctgtctgcaagaaatcacactcaggaggcaaaggaggtgattatacagaactagaaggcacaggacggccattcagtccagtccatactttttgtggctgggctttagccatacctcatttcctcctccatcaatcaaggcaacaaaattgccttcatttttgtaacaagcatttagcattcttatgctgtagataaaatacacaggaagccaaggccaggtgcggtggctcacacctgtaatcccagcactttgggaggccgaggcaggcagatcacctgaggtcaggagttcaagaccaacatggcaaaaccccacctctactaaaaatataaaaattagctgggcgtggtggcacacacctgtaatcccagctgcttgggtggctaaggcgagagaattgcttgaacccgggaggcggaggttgcagtgagctgaaatcatgccactgcactccagcctgggcaacagagcaagactctgtctccaaaaaaaataataataaattctatcttaaaaaaaatacacaggaaacttagcatgaaaataattctctcagaggcacatcttttggttttgtgaaaagaagtgtaaaagattggattaatctgcttttttgccagtgttgacagagctttcattttctctgaattgattgtgtgtttctgcctttggatacatgggtaagaagtcaggccctcagctgcctgagggttgcggtttgcggagcagcaatgccctgcccatcccctgcctggttgcagggaagcttctctaacatgcagctggtccagttcttttgtgccatctttctcagcgtttcaggatagccatcatttcttttgtgttgctccagctcatgactaaaggaattgaagaagttgccctgctctctggatatttctgttgagtaacgtccctggccagcagtttatgcacacttaacacacgtagtctgcgctctgcctctatctagcagaatctgctttgggcaagttacttaacctctctgtgcttccatctccttatgtgtaatcagcagtacaggatctgtctgcatggctgttacgagggtttaatacgttaatagatgtaaaacgcgtagaagggtgtctggcacacaggaagttctacaaaaatgttggctattttcatgaatgttgtttccccagctaaagttgtcaccagtaaagttaagtttctgtatattttagactatataaaatgtctgtctgcacaggtttactgtatatatgtcttatgtatatacatatgtcacttactgatttaaaggggattgttaatctgtctctgaccatcttccttctaattacagggcctcaagtggttgggaatttgtttctcgaagtcatcagggccttttattcttactgcagagatgcccttggctctgatcttaaacttagctacacccagagtggaaattcgctgataaggtatgggtttggccttgaacctcacgcatctctctccctccccggtactgtgattttttttttcctctcttgcttactataaattgtgaagtggtagagaaagcagagatgcagcaggtgagaccattggtgaaaataatcaatgcgttgaagtcagtccatgggaattgactgttccctactgagtacggtgaagagtttaaagggagtttgatatagtctttcccccagcctgggatggacaggtatttattgattttttgatcaagtatgaaacaatgaaatgtatgtattgatcaagtatgaaactcgtttaacaaaggcagcttgatctagtatacccaagtggtgagttacagggcagagagaacagagaaaatggaggggagggcacctggcaagtggaaaggggatgtgagtcttcaggacaggagtccagggggtgttgggggagattgggggagacccaggcagggcaccggagagcacaggctccattcccccagaggcagagtgagtggtgtttggaagacagcgggcacattggcctcacgtgcgcagttacacacaaaccctgttttgtttgtttattttgttccttttaagggaatacaactttttcctttttgctttactcttaatgtaatttccttctgcctgaactagcattgggtacattgaaaatttaaatcaatgttaatatttttctggtttgttagttgtaagtgtactaagagttcttagtgtttgcttttttctcccagaatgaaagcggtttattgtttttctgagtatgaaagtaatacatgctcattgttgcatttactgatatttgaaagatcaagaaaaaaggtgtcacacgtaatcctagcactcttcagagaaaaccataaaacatttttacttctttctagatttctactacatacataaatacatagatgcctgtcttttattttaaaggtagaattacaccagttatttagttgcttggggttttctttttgttttcttgttggtttgtttgtttggttttgagacagggtcacccaggctggagtgcagtggcgtgaacatggctctctgcagcctcagtctcctgggctcaagcgatcctcacgcctcagccccttaagtagctgggactacagacatgcaccaccatgcccagctaattttttttttttttttttgtggagatgaggtttcaccatgttgctcaggctggtctcaaactcctgagctcaagcaatctgcccacctcagcttttcaaagtgctaggattataggtgtgagccgccatgcctggtactctctggagtgtcactctccagcatgacaaggtctcactctgtctcccaggctagagcacagtggcaccatcaatggtcactgcagccttgaactcctgggatcaagtgatcctcacacctcagcttcccaagtagctacgactataggcacacacaaccacacctggctaatttttaatttttctgtagagacaaggtcttgctatgttgcacaggctggtcttgaattcctggcctcaagcagtcctcctgcctcagcctcccaaactgctgggactacaggtgtgagccactgtgcccggccactgcttgttttttaaaatgcaagttgtgagtagctctacactattctcctatgggattagttgccttagatatttgttaaggatttatcatttatttaaggccaagtgcagtggctcacgcctgtaatttcagcactttgggaggccaaggcaggcggatcacttgaggtcagcagttcaagaccagcctggccaacatgacaaaacctggtctctacaaaaaaaatacaaaggttagccgggtgtggtgggccatgcctgtagtcccagctacttgggaggctgaggcatgagaattgcttgaacctgggaggtggaggctgcagtgagccaagatcgtgccactgcactccagcctgggcgacagagcgacacttcatctcaaaaaataaataaaaataataaatcctgactgaccaatttcttattgattgacttttagacagtttctgctttttcagttttgtttgtttgtttgcttttgagacagagtcttgctctgttgcccaggctggagtgcagtgatgtggtcttggctcactgcaactccacctcccaagttcaagtgattctcctgcctcagcctcctgagtagctaggattacaggcacctgccaccactcctggctaattttttgtatttttagtggagatggggttttcaccatgttggccaggctggcctcgaattcctgacctcgtgatccacctgcttcagcctcccaaagcactgggattacaggcatcagccactgcgcacagcctgtttgtttgtttttgagacggagtctcgctctgtacccagcctggggtgcggtggcgccatctcggctcattgcaacctccacctcctgggctaaagcaattttcgtgcctcagcctcccgagtagctgggattacagatgcccactatcatatctggctaatttttatgtttttagtagtgacagagttttgccatgtttgccaggctggtctcaaactcctgacctcaagtgatctgcctgcctcggcctcccaaagtgctgggattgcaggtgtgaactaccacacccggcctttttcagtattttttaatggccatttagtggtacacttctgcacacatctatgtagctgtgcagggatttcggtaggataaatttcttgaataaatttcctgagccatagaagataaaatttaaggctggatgctatggcttatgcctgtaattccagcactttgggaggctgaggcaggtggatcacttgaggtcaggagtttgagaccagcctggccaacatcacggtgaaaccccgtctctactaaaaatacaaaacttagctgggcgtggtggtgcacgtctgtaatccatcctagctactcgggaggctgaggcaggagaatcgcttgaacctgggaggcagagattgcagtgagccgagattgtaccactgcactccagcctaggaaacagtgagactgtgtctcaaaaaaaaaaaagaagataaacatttaaaatcttggctgaatttccctgctgaatatccatgtaccatgttattccaccagtagagtatggactaaaactgattttctgtacaaattctttttacagtagctctgaaattattattattttatttttatttttattttttgagacagagtctcactctgtcatccaggctggagtgcagtggctcaatctcagctcactgcaacctccgcctcccaggttcaggcgattctcccacttcagcctcctgagtacctgggattacaggtatccgccatcatgccctgctaatttttgtatttttgtagagacagggtttcaccatgttggtcaagctggtgcacccacctcagcctcccaaagtgctgtgattacaggtgtgagccaccgcacccagctctgaaatttatttttaagagactgtatcaatataaatattgtttacgatggcattatgcaaacacattataagaacagtaatattttcatttttatcagggtgtgtcagcttctctagaaataagttgcagatggtgaaatcaattacagttttttggacactttttgtaattcaggatttttttatagacatatttattcatgtcctccccttttacagtgcaatcaaggaaaacagaaatgcctctgagattgtcaaaacggtaaatttgctgataacttctctaagcacagactttctctgggattatatgacaaggtgttttgaggaatgctttaggtaagtatgcagttcaagaatgcagaatatttaggaaggatgagagggtttaataattttgtagctgcttagaatatcagattatatataagtagctgaagctgagtagtctttcctgagttttaaaattcaactaaaacaggattggaaagaattcacttaagattctagcagaataaaaacatctccaataagaaggttcacataatctttgccatgtaattctgaagctgctttaaaagtctaactttagaaaatcctcagcgcattttctggttacattcatcaaatcagctttcctctcctggctgcccgatctattgaaagcagcttagttttgtggctttgtgactggatagagtgtttttgaaactcttgctgaaatgaatgtaactggtcagataaaagcattaatgttttaagctactataatcagctttaccatctcttttaaccgggtgaattgcaccacccctaaattgtttgcagtggcgtaccccaggaataccgagctttcctggagagccctttcccatgccattttctttacgggaggaataaggtcatgtctcaaaccctgttttgtcctgaggcatgctgtaaaacttatttcttgttcatctccactgtaatgctcttggctgtttcagagtcttacttctcagctgctaccactacacttttctgcccaaataagctcacaaccctgggaaaaataagttaattgcaattggatccacaggcaacagcaaggccatattatattgaggttagagtatgctttggtcagcctggttgttatgttattttttattttatgacggagtctctgtctctcaccgagactggagttcactggcacgatcccagctcactgcaacctctgcctcccaggttcaagcgatcctcccatcctggcctcctaaatagctgagactacaggctcagcctcccaagtaactgcgactacaggtgcacgccaccacacccagctaatttttgtatttttagtagagacagggtttcaccatgttggccaggctggtcccaaactcctgacctcaagtgatccacccgccttggcctcccaaattgctgggattacaggcatgagccgccgcatctggccatcctggttattaaaaaaaaaaaaagaataaaatgtttctacccagatagagctgactctccatctttgcaacattttgtcctcttttcatcccagagttaatccctgtcctgagattaatgtctgtcttcagtgtaacatggctttgctgttgcctgtggatcctattacagttaatttattcatcccagggttatgagatgaaaagcaatagatactttttaacttacccatttatctagtagcctgtttattttaaaagaagtcttgaatttcagtataagataagcaactaacaatagttgattggtggggttacacttctctacagaagctgaaactttctaggcaactcaggtgctgataaactcctggaattacttggagaggagtagtcccaggccactcctacagcagggtgaacagccatgtggactgtggtgttctccagcccagcctcgttcccttggatcgtgcttttgggcttggactggggacttgggattacatctgtcgatggtactccaggtctcctgggagacacctgaattggtagagttcaagtcagagggaatctgtttggacaccaacagattcaggacacttattgacacttctacatgttagatacttttagtcaccaaaatttagttatgagaactacaaaagctgccttccattatgtttgaagtagaataacgttactggaaattgtaagaaatgcttggacttaccgcaggaagaagaattgattttttttttttttctgagacagagtcttgctctgtcacccaggctggagtgcagtggtgcgatcttgtctcactgcaacctctgcctcccgggttcaagtaattctcatgcctcagcctcccaagtagctaggactacaggcgtgggccaccacacctggctaatttttttgtactttagtagagatggggtttcaccatgttgcccaggctggtctcagactcctgagctcagacagtccacccatctcggcctcccaaagtgttaagattataggtgtgagcctccatgcctggccaaagaatggattttttctttgctgtgatttatagaccagtgaagcagcgttacagcgtgaggaacagcgtcagccctccccccacggtctcggagctctgcgccctcctggtcttcctgctggatgtcattcctttggtgagtgctggggaagggacatctcaacgcctgctattatttacattcttactggtggtgatggcctgctttatcaacctcacattactgaaaatgttttacataaatatgcaacactgttttgatgtttgttttggcataaaagatatagctggatgtaatctcttaaatttttaatgtcttatttaaaaggggctataacttttgggccagttgtaagtgggcaaagctgaagttaggtcaaccagctgaagaactgggtatcattcccgtactacagttactttagggaaagagtcaatacatttcctagttaaaattgtgctgttggctaattttctcaaaggaaactaatttccttaatgtagaaacgtgccaattttattttttattagaaagtgtaaagccacttgcaaggagaggagtaacatccttgatttgtctagatcaaattgaaataccgagcctagctctgtggtatgcgctcgtaattcccagctactcaggaggctgagattggagcattgcttgagcccaggaatttgagaccagcctggacagcataacatgatccagtctcaaacaaaaacaatagaaatgttcttttcttttctctgtctctctctctctttttttttttttctcctgtgacagagttttgctcttgttgtccaggctggagtgcaatggtgtgatctcggctcactgcaacctccgcctctggggttcaagtgattctcctgcctcggcctcccaggtagctgggattacaggcacctgccactacgcccagctaattttttgtatttttagtagagacagggtttcaccatattggccaagctggtcttgaactcctgacctcaggcgatccaccagcctcggcctcccaaagtgctgggattacagatgtgagccaccatgcccatcctcttttctcttttttgagatagagcctcactgtcacccaggctggagtgcagtggcatgatctcagctcactgtagcctcatcctcccaggctcaagcaatcctcccacctcagcctcccaagtgtctgagaccacaggcatgtgccaccacatctggatagttttagtattttttgtagagatggggtctcactgtgttgcccaggctggtctcgaactcctgagctcaagcaatctccctgcatcagcctcccaaggtgctggctgggattataggcatgagccactacgcctagtcttcttttgttttctgatttgaaaattaatatggtatggtggctcacgtctgtaatcccagcactttgggaggccgaggtgggcggatcacaaggtcaggagattgagaccaccctggctaacacggtgaaaccccgtctctactaaaaaaaatacaaaaagttagccgggtgtggtggcgggcgcctgtagtcccagctactcaggaggctgaggcaggagaatggtgtgaacctgggaggcagagcttgcagtgagccgagatcacaccactgcactccagcctgggtgacagagtgagacttcatctcaaaaaaataaataaataaataaataaaataaaataaaataaaaaagaaaattaatgtgggtcaggcacggtggctcacgcctgtaattccagcactttgggaggccaaggtggatggatcacaaagtcaggagatcgagaccatcctggctaacacggtgaaaccccatctctactaaacatacaaaaaattagccgggcgtggtggtgggcacctgtagtcccagctgctcgggaggctgaggcaggagaatggcgtgaacccgggaggctgagcttgcagtgagccgagatcgcgacactgcactccagcctgggctacagagcaagactctgtcaaaaaaaaagaaagaaagaaagaaagaaaattagtgtgaaatttatgccctaaaaaattgaattagatgccattttgagatgcattgtttttctgattgtgaaccaacattgtggggttaacctacacgtttatttcacaggaactttactctgaggtgcaaacccagtatctccctcaggtgctcggctgcctggtgcagcctcttgctgaggacatggaggccttaagtttacctgaactcacgcatgccttgaagacgtgtttcaaggtgctcagcaaagtccagatgcctccttcctacctcgacacggagtccaccagcggaacctcggtgtgtactctgaggggcagaaatggttctgggggctaaaagcagcttatgccttcctgggagtagaaagtctttagggttggttaggataggaataaagatgagaagatacccaggtgatatgtcaaatatgcttgtaaaaccctcactttaaaaggttttagcacctggcatggtacaatggctcacacctgtaataccaacactttcggagactggggcaggaggattgcttgagcccaggagttcgagaccagcctgggcaacatagcaagccttcatctctctacaaaataaaaattaggccaagtacagtggcccacacctgtaatcccagcactttggcaagctgaggcgggtggatctcctgaagtcaggaattcaagaccagcccaaccaacatggcaaaaccccatctctattaaaaatacaaaaattagccaggcatggtggcacatgcctgtagtcccagttacttgggaggctgaggctggagaatctcttgaacctgggaggcggaggttgcagtgagccatcacgccactgcacttaagcctgggcaacagagcaagactccgtttcaaaaaaaaaaataaataaaaataagggctgggcgcggtggctcacgcctgtaatcccagcactttgggaggccgaggcgggcagatcatgaggtcaggagatcaagaccatcctggctaacatggtgaaaccctgcctctactaaaaatacaaaaaattagccgggtgcagtggcgggcgcctgtagtcccagctactcaggaggctgaggcaggagaacagcgtgaacccaggaggcagaccttgcagtgagccgagatagtgccactgcagtccagcctaggcgaaaaagtgagactctgtctcaaaataaataaataaaataaaataaaataaaataaaataaaataaaataaaataaaataaaaaggcatggtggtgttcacctgtagttccatctactcaggaggctgaggtgggaggatcgcttgagcccaacaggttgaggctgcagtgagccatgattgcacggctgcactccagcctgagtgagagcaagaccctgtctctacaaaaaaaaatttttaagtttagcaccctttgtttcacccattctcatgctacttgcctgctctgtaactgcagttaatggttagatacagttaataactatgtaactacagttaatgggctagttataactagccctgcactgttttatgtgtgtgtttgtggcatgtgattttggttatttcgaatataagcgagatgaggtactggattagtttgctgggactgccataataaagtaccacagactgggtggcttccacaacagacacttgttttctcatggttttgaaggccagggcctgacacgaaggtgtcagcaaggttggcacctcctgagtgcactggggaaaaagagtctgtctcatgcctcccccgagcttctggtggtttgctggcaatattcagcattcctcggcttgtccaggcatcagcccagtctcggcctttatgttcacttggctgtcaacctgtgtgcatgtctgtctctgtgtccagatctctcctttttataaatccagtcctactggatttgggcccactctaatgatctcatcttaattggatcatctgcagagactctattttcaaattaaggtcacattcacaggtattgggagttaggacttcaacctatttttgggggacaccgttcaacccataacgtacactattctctgacttgctttaccttttttttttttttttttgagacagagtctctctctgtcgcccaggctggagtgcagtggcatgattttggctcactgcaacctccacctcatgggttcaagcgattctcatgcctcagcctcccaagtagctgggattacaggcacccaccaccatgcctggctaattttttgtatttttagtagagatggggtttcaccatgttggccatgctggtcttgagctcctgacctcaggagatccacccacctcatcctcccaaagtgctgggattacaggcatgagccaccacacctggccttattttatttcttcatacctttattttaccctcagctcagtttcctcattcatatttgttaatttgtcggaaacagttctcgctctgttgtccagagaattgtggcaggtgatccgcccgcctcagcctccctaagtgctgggattacaggcttgagccaccacgcctggcagaaacaattcttaaacaacttttttgaactctaaaggggttatatatttagacaaaaacacaagaaaaataggcccaaaagccagcctccccagagagcatgtgggtgtaccagcctcctctttgctacccaccgctctccttctcctgctttgggtgcctcctaaatttcattatacacttaacacagggattctctagtctggagagtgatgattttgaaaaacagaattgaaatacattcatgatttcaactgatacttaaatagcttggtgttaagagatgcacaattcacatctttttattttttacagagtccagtaaaaggtgaaaacggcaaaataattttggaaacaaaggcagtgattcccggtgacgaagatgcttcgtttccccctctgaagtctgaggacagtgggatcgggctcagtgcctcgtcaccggagctctctgagcacttgagggttcctcgagtttctctggaaagggacgacgtttggaagaagggcgggagcatgcagaggacgtttctttgcatccaagagctaatcgccaactttgccagcaagaacatttttggagtacagctgacagcgtcaggagaagaaagcaagtccgaggagcctgcagggaagagggacagggatgggacgcagagcctggcagccaatgattccagcaggaagaactcttgggagcccaagcccatcactgtgcctcagttcaagcagatgctgtcagacttgttcacagcacgagggtctccattcaagacaaaaagttcagagtcaccatcgtcttcgcccagcagccctgccaggaaaaacgggggagaatgggatgttgagaaggtggtcattgacctggggggttccagggaggaacgcagggaggcctttgccgccgcctgccacctgctgctggattgtgccactttccctgtctacctgtccgaggaagagaccgagcagctctgtgcaacgctcttccagctgccaggtgagaggcagccctgccgaagtccctctttgggaatcatacgatgaggcgattgacgtgggtggaatatcccctatccacaatgctagggaccaaatgtattttggatttcggacttttttcagatttttggaatatttgccttacacttaccgattcagcattcctaatccagaaatccaaaatccaagagctccagtgactgtttccttcgagcatcatgtcagtgctaataaggtttcaggttttggatttggaattttcagattagagattctcaacctatatttaaagactagctcaaattgtgtaagccaagaaggtgctattggcctcatttgttcccttcctcatttgtaattagtacatttttgacttgtgtctcaccacatggcaaagtggtaagggtggggcctatgtttttaaaccctgggtgtccagcacagcccatcagaagacctagaacatgagtggcattcagtgatagtaaatagactatttcatgatgcctgttgataaagttttttttgtgttgggtttttttgttttttttttttttttgagacagggtctggctctgttgcccaggctggagtgtggtgacaccaactcagctcactgcaacctccgcctcctgggttcaagtgattcttctgcctcagcttccccagtagctgggactacaggcacgtgccactacgcccagctaattttttttttttttttttttgagacagcgtcttgctctgtcgccaggctggagtgcagtggcgcgatcttggctcactacagcctccgcctcccgggttcaagtgattctcctacctcagcctcccaagtatctggggttacaggcacacgccaccacacccagctaatttttgtatttttagtagagacagggtttcaccatgttggccaggatggtctcaatcttttgacctcgcgatccacccgcctaggcctcccaaagtgctggggttacaggcgtgagccactgcacctggccccctaattttcatatttttagtagagatggggtttcaccatgttggccaggctggtctcaaactcctggcctcatatgatctgcccgccttggcctcccaaagtgctgggattacaggcatgagccaccgtgcctggccaatattttatatattggtttgctagggctcctctaacaaagtaccataaactgagaaatttgtctcatagttctggaagccagaagtccaagatcaaggtgtcagcagagccatactcctcctctgagaccctggatggaatactttttggcctcttcagcttctggtgctggccggcaacccttggagggctcctcaccttgcagctgcatcagtcccgtctctgcctttgtcttcacagggtgtcctctgtatgtcctgtcttcccttgacatgtccctcttacaaggacaccagtcatattggattagggcccaccctaacaacctcatcttaatttgattacctctgtaaggaccttatttccaaataagtctcaccagcgggaggttagcgcactgctgtccaggtggatttctcaggtaacttcccagatctagggtgctgtagaatctgcagactggggacccattctcacgtggttctgcttgtttctgcctctccggctggcttcctttcaggagccggtgattccagttttccatcttggctgaagtccctcatgactatttgctgctgtgtgactgactgctacctccagaacgtggccatttccactctgctggaagtgataaaccattcccagtccctggcgcttgtcattgaagacaagatgaaacgctataagagctctggacacaaccctttttttggcaagctgcagatggtgacggttcctcccattgctccagggatattgaaagtcattgcagagaaaacagatttctatcaggtatttcccactgggaacactcttcttatggcctccttctccccctgagcaaaactcagaaccgtattgctggggatgggggcagtggcccacttctctgagagtgatattctatagggcactgggcagaggcagtagcctttggtcttcctctcccagcatgtaactttcaccctccaggaaagctacagtgagagcaactggggccccagtattctgggcctgccaggactgagtggaacccctgcctgggagtggggtctgggtggaggcagggagcccatgactcctccactgcactcacctggatttagcctctgccacatccagcagaggggtgggaaggtgacgtgctggtggcctgcccctcccaggaggtgcaaaagcccttgactgggagctggggaaagagagcacccttttgcttggccacatgcaccagagtggatagtgacgtttccatggagctaagctggggaaggaaggagatgatgagcaggtcatggctcaagtgccatgactcttgctgctttgaccgaaatgtcgtaggttttccggaataaatgtttctttatttcctgaatgtcctttggataatttccagactctaaatggttggttgttgttggttttaaaataattttcaccagttatggttgtgttgcttgggagagggtctgtctgtggaactcctcacaccgctcagctttggttccatgtgggacaccatctacggtgtcaggtcctgggggagcttttacttaattgctcattgactttttttgttgttgttgttgagacggagtcccgctctgtcacccaggctggagtgcagtggcacgatctcggctcactgcaacctctgcctcccatgttcaagcaattctcctgcctcagcctcccgagtagctgggactacaggcacctgccaccacacctggctaatttttgtatttttagtagagatggggttttaccgcattggccaggctggtctcaaactcctgacctcaggagtttgggaggcccgcctcagcctcccaaagtgccagaattataggtgtgagccaccgtgcccagctgcttattgacttttgtaccacatttcttcttcctgctagagttgagtcacattagatcttgaatagacagaacttgaaaccaggactggaaccgctataagcagcagtgattaagcaagtgtcatcttggccctacatagatcagagatcagaaaatttggcatatttacactatatataggcacaggggagaaaaaagaagaaagaattgagatcatgaatctttggaaaggtactcatagaataaaagtggcagcattaaatacattccttttattttggggcagtgagggaagcttttccaagttcttactgaagccttgatttttactttcattttcatgtagtacatattcaagtacttaccatttgcctggcactagagcatacttttcttttttttttttccttgagacagagtcttgctctgttgcccaggctggagtgcaatggcatgatcttggcctctgcctcctgaattcaagcgattcccctgcctcagcttccctggtagctgggactacagatgtgcgccctcacacctggctaatttttgtatttttagtagagacggggttttaccatattggccacgctggtctcaaactcctgacttcaagtgatcctcccacctcagcctcccaaagtgccttacaggcgtgagccaccgcacccggccaagagcatactttttttattgacatgtaatattgtatatatatatgggtacaatttgatattctgacacatttatacattgtatgatgatcaaatcatggtaattagcatacccatcaccttaagcatttatcatttctttgttgtgaaaacattcagaaccctctcttctagcaatttgaaatacacaatgcattattgttagcagtagtcaccctactgtgcagtagagtaccaagatttattccttggagcacacttttatgtactgtacagttcttgagagttgaggacagcggcagctagtgcctgtccctgttgcagatgctggaactagagacacagcaaccttacccatagccaggacgtgcccccaattctcagactccagacagggctgttgtctgatctttcagcctttttttaatcctgcgggaacagctcacataccagagttcctgcttcccacagtgcaaacaagaaaaggtcagatagcccaagggtgccctgacctttcttatcaggtagtgttggcagatttcagataactaagacaacacccagaacagaggagtagagtaaggtttaaacatgtgaaggaaggcccggctcggtggctcacgcctgtaatcccagcatccagcactttaggaggctgagggctgcttgcttgagctcaggagttcgagaccagtctggccaacacggcaaaatcccatgtctaaaaaaaaaaaatacaaaaattaacctggcatggtggcacacacctgtagtcccagctacttgggaggctgaggtgggaggatcacttgagccaaggaggcagaggttgcagtgagttgacatcgtgccactgcactccagcctggggcacatagtgagaccctgcctcaaaaaaatatatatgagggagtaggtatggatttgtgatcggcatcaactctcaaaaaccttgcaaaaaaattttttaaaccttccggaagggagtctcttgcatatatatttgccatagtgacagcaaggaagtcggggggggggcggtctacgtagtcaaaaagttatatatcagaattcaattgtaatgtgattgttggaaatcactttcccttagagaaaaagtaacaaaataatggttaggagtttgagccagtcagtggttaacttgatctatgcagagaaagacggttttgttgagtagaaataaatgggccaaagaagttatttgatctaagttatgcctaaaatactccagtctatgagatataaacttcatatagtctatgaagtataagaatgtctttagaaatttagaaatttccctcccggaagtggggaccagccctccttctgggtctcacccttgttggggcaggcacactggctcctgctccctgccacttggcaaggggctgtagccctttgcagaccatgcatgtttaatgagctcagttcagggctgggaagatggaggacacgatttgggggtataatagtgttttgaaagtgaggcaggcacctgccacagcgttgtgcagggaaaagggaagagtcaagttagtggaattaaagctggtaggcgtggctctttatccatgctgcgtggtaaccaattcgagcagaccccagaggtgaccaagtgctgtggagctgaaccccagaatgagtgatcttgacaaccactgtaaattcaccaaactccccagagggtacatctgtgcattccccagtgcctgctcggcacctgcctgttgaaagaatgcttcaacccctttggtccagtttccagttaattctctttctgaaagtaatgttgaggttgaggcaagagctgcagtgttcttagtcggccagaaacctccaggtttgacctcctataacattgcctgctgcctggatgactttggtgggtttttcctttttttcttttttctttttctttttctttttttttttttttttgagacagagtctcactctattgcccaggctggagtgtagttgcatgatctcaggatctcagctcactgcaacctccgcctcctggattcaagtgattctcctgcctcaccctcccaagtagctgggattacaggtgcccgccgccacacctggctaatttttgtatttttagtagagttggggttttgccatgttgaccaggctggtcttgaactcctgacctcaggtgatctgccccacttcgacctcccaaagtgctgggattacaggcatgagccaccgctcccagcctttggtaggtttcttgctttatttgttggtgatttgtctctgagcatggaggattctcacatggcaagtataggtgagatccagtatgtcggggctgggactgactgagtgaggatgtgagcggatgttgcctgtgttgacctggtcccccaccgcctgccttttccttgtcccagagggtggctcgtgtgctttggaatcagctgaacaaagagacccgggagcatcacgtcacctgcgtagaattgttctaccggctgcactgcctggcccctacggccaacatctgcgaggacatcatctgccatgccctcctggaccctgacaaggtgagcctttctggccgccacctccatcctgcagcaccccggcccctgctgtacgtgcccttagccaactgacatccattcggtcgaagtctttctggggctgagtggacatcgtgattaataaaataagcagaggtgttctaggatttcagtactggaaggccactagaagcatgagccattctttttacagccctggaaatgtggtttgtgaccatattgaggctcaccagggaaacctgcccaaacttgctggaaggacttgcagggcttctgcaggtgttggcaaaataggcagttgtagggaatttattgtccctttaagaacttattgaagcagggcgtggtggctcacacccgtaatcccagcattttgggaggctgaggtgggagaaattgaggccaggagttcaagacctgcctgggcaacatagtgagatccatctctaccaaaaataaataaataaataaggccaggtgcagtgactcacgcctgtaattccagcactttgggaggccaaagcaggcggatcacctgaggtcaggagtttgagaccagcctgggcaacatggtgaaaccctgtctgtactaaaaatacaatattagccgggcatggtggcacatgcctgtaatcccagctactcgggaggctgaggcaggagaaccacttgaatctgggaggcggaggttgcggtgagccgagatcgcgccactgcactctggtttgggtgacagagcaagactccgtctcaaaaaataaataaataaaaataataataaaccaatttttttaaaagaatatattttattgagaatttatcgtcctgggtctcctttccagtctgttgtgtctcctcgttctttaagacacttgggcctgacacttgcaaggaagccatgctcctttgtgttttcctttggctgcagaccacaggggtgaccctggactctaatactgagttctgaatgtgccgctgtgttaaagtgaacaatcagagagagaggatgcaggttctccttttccttctggccgaatcagtcaaaggagaatgcagcgtctttgctgtggttgctgtcagttctgctgaagtctttgatctattgtttaaatggggtttatggtgactgaagacagtggtcagttacaaaaccaagttcctcactcccatgtatctcctcatcaagggaacaaggctggaagctctgtttagattttccgtgatctggcatctgacaagagagatccaaggcagtcgagtaacatctcacaatcgctcctttgataggtgaggcggccttcgttatgatctaccgttaactcacgaggaaactccacagaggtgcctgcccaacgtgtggggctggggagggagaggagcgtgcagttgaaaacatgaacccatatgaccgggtgtggtggctcacgcctgtaatcccagccctttgggaagccgaggcgggcagatcacttgaggcctggagttagagaccagcctggccaacatggtgaaaccccatctctaccaaaaatacaaaaattagctgggcgtggtggtgggcacctgtaatcccagctacttgggatggtgaggcagtagaatcacttgaacccgggaggcaaaggttgcagtgagccgagactgcgccactccactccagcctgggtgacaagagcgaaactccatctcaaacaaagaaaagctgacccctgcacatgacccctccgagcacagccagtggttcccataaacccctaagtgaatttaggccagacacatgtgaacacatgttaggaattttcttaatttggttgggatgtgaggaatcctggcatgccccgggatcacctgtgcagcttttacggcatgcccctatgaggggactttgcagggaggtcagatggcctagacctcccctggagcagtgaccatacttggtgtgtgtgcttgtcccatcactgtctcatgcttaagaggtgaacttgattgcagcccattgtattccacattgtttttcccgagtgcctctgaaactctaggtgtgaggccaggcactcggccttagagacaccagctgattctgatgcctgaggcccaggcccagactcagatatataacccatttggggtgaggcctgagcattgggattttaaatgctcccactggtgattccaacgcgaaaccaaagttgagtccccattgtgctcatctacttgggtctggaagtccagcttgggtggaggtcctagggtacctgtgttgggtgacgccctatgcccagtgtctgccacggtgcctggcgcacaggggtggctgcgagtgaactcactggtgtgtttcccactgcaggtccttgtttgtcgtgctggacagcctggcctgcacggatggtgccatcggtgcggcagcccagggctggctggtgcgtgcgctctccctcggggacgtggctcgcatcctcgaacccgtgctcctgctgctgctgcagccaaaaacccagagaacctccatccactgcctcaagcaggagaactcggccggtgagcagcctgcacaggacccgagggtgagggaggaatgggtggggggactggacctcagcagtgatagctgagagactgaggcccactagggggttttgttagatgcaaatggtactttgtaaattgtgaggacttcggcaatttaaggacctagtgatctagcatttagaactattagggagtgggtttgctgttttcactgaaaaaccagattgttttgttattaaaaaaggaaagttggccaggcacggtggctcacaactgtaatcctagcattttgggaggctgaggcaggtggatcacctgaggtcaggagttcaagaccagcctggccaatatggtgaaaccccgtctctactaaaaatacaaaaattagccgggcgtggtggtacatgcctgtaatcccagctactcaggaggctgaggcaggagaatctcttgaacccgggaggtagagattgcagtgagctgagatggtgccactgcactccagcctgggtgacagagagagactgtcattcataaatacataaataaataaataaaataacttatttgtgaaccttcaactacaaggtaagtggtttattttctatctgtgctctaagattcttttagactataaaatcttgttaatcagattatcagaaatgaagaagaaataaacctttcagttcagagaacttccagaggcatctttaacacaaacataaaagaatataggtagaaattaggaaagaaaagaaaaactaaataagcctgatgagtcaattaaacttcagtgattaatatctaatgcattttatgaactaacattacttcctacaatagctgtatttaatgacttcacaattttctaagggatggtttgcaaactttgagtgagtttgtttagcttgaggcagaaatttaaaaataataataagaagaagtactgcattcattcattccaagaaaagtaacagacaaggctataagaaggttgtagtgacctagtctaagaagtaaaaaccaaggcccagaatgtggcaagacaagggttaaaaagtaaagaagggctggacggtggctcacccctgtaatcccagcactttgggaggctgaggcaggcagatcgtgaggtcaagagatcgagaccatcctggctaacacggtgaaaccccatctctactaaaaatacaaaaaataagccaggcatggtggcaggggcctgtaatcccagctactcgggaggctgaggcaggagaatggcatgaacccaggaggcagaggttgcagtgagccaagatcacaccactgcactccagcctgggcaaaagagtgagactccatctcaaaaaaaaaagaaagaaaagaagaacaagttttcctctgcctagcaagctcacttcaaagacagttataagctaacgctgttcgagaagttgaaaccaaaggaataagctccagacacccccctctccagatcaagggtgaaggaaaaaaaggacaaatgtctgtatttagccagttcttgttttttcttatcctgtatttatcttaatctttttttttttttttttttttttgagacagagtctcgctctgtcacccaagctggagtgcagtggtgcaatctcggctcactgcaacctccgcctcccgggttcaagtgattctcctgcctcagcctcctgagtagctgggattacaggcatgcaccaccatgcctggctaatttttttttctttctttctttttttttttttttttttgtatttttagtagagacagggtttcaccatgttggtcaggctggtctcgaactcctgaccccaaatgatcctcccgcctcagcctcctaaattgctgggattacaggcatgagccaccacgcctggctatctcaatcttatcttacagagaaaagcaacccattagctaagtaagcagaggtgtgtgaaatggtttcctgtctttataaggctcctggcctaaacctctaacctctggttttcctttaggggaaaagctggctgccctatcaaataggaaacattttattgttccacattgtaagaaagtaaaactgaaagaagtgtaaacaaagaaccttcttaaaagtttggctactattcatggcagctacattttttagtatttctttttctttctgttttaagaggaaagctctatctccacagttccttgggcattattattattattattattattattattattattattgaagaagagtctcactctgttgcccaggctggagtacagtggtgtgatcccaagtcactgcagtctttgcctcccaggttcaagcaattctcctgcctcagcctcccaagtagctgggattacaggcgctggccaccacagccaactaattttttgtatttttagtggagacggggtttcaccatgttagccaggttaggtctctaactcctgacctcaagtgatccatgcgcctctacctcccaaagcgctgggattacaggtgtgagccaccatgcccagccttagttttggtatttttagtagagatgggtgtttcgccatgttggctagactggtcttgaactcctgagctcaagtgttccacccgcctcaaccttccaaaatgctgggattacaggcatgagctactacgcctggccttccttgggctttaaaagttccccagcactaccttgctgcttcctctaatctgtgtttcctgctgaccacagaaatggtctgctacctccgaataggagagaacatctttgctctgccattttctttctctgaaaaaaatgataagtgtcctgcttaccccaccctatttctgtaatcctgtagaaatctatttttaaaatactgctatgcacttcaagcagctcatcaatttctgatgtctgattcttcttcatttcttgatcttgcttaatgtccatggcatagagtttttttaaagctcttttgtgtgcctttatcttgtttgatcatcctaaaaaccttatgagaatgacagatttcttcttttcttttttttttttttttgagatggagtctcactctgtggcccaggctggagtgcagtggcgcaatcttggttcattgcaacctctgccttccaggttcaagccattcgcctgcctcagactcctgagtagctggcattacaggcacgcgccgccacgcccagctaatttttgtatttttagtagagatggggtttcgccatgttggccagactggtcttgaactcctggccccaagtgatccgcccacctcagcctcccaaagtgctagaattacaggtatgagctaccatgcccggctcatggcatagatttattgaacactgcttatttaaaatgtttggcaatatcaaagacttttgactcactaatttttttttccttttcttcttttttttttttttttaaataggcagtggtcagtggcctatttgacttctcctaaaaaagacttcaatattttaaagtgtcatacgttttctgattatagaagtactaacatggttagttttaaaatggaaataatgaggacataaaaacctaagtggaagtcctttgtaatgctagttgatagaactagggattgttaatggcttgcaggtagtctcccagactttcctagtggctgtgtattatacatactctctcctaactgggctcattctacataatactcttctgctgcttgattttttttttcctttctttttagagacaggggtctcactctgttgcccaagctggagtgcagtgacaccatcatagctcactgcagtctcgaactcctgggctcaagagaccctcctgcctcagcctcccgagtagctaggactacaagtgtgtgtcaccatacctagatagcttttaaattttttctagagatggagtttttccatgttgcccaggctggtttggaactcttgggatcaagcaatcctcctaccttggccttggcctcccaaacaatcctcctaccttggtctcccacagtattgggattacaggcataattcactgtacctggcctgatttttcctttcctttttttttttttttttttttttttgagacagagtctcactctgttgcctagtctggagtgtagtggcatgatttcagctcactgcaacttccatctttcaggttcaagtgattctcctgtctcagtctcccacgctgggactatgggcacgcaccaccacgtccagctaatttttgtatttttagtagatggagtttctccatgttggccaggctggtctcaaactcctgacctcaggtgatctgtcctcctaggcctcccaaagtgctgggattacaggcatgagccaccatgccaccacacccagcctccagtttgtctttatacacatgtgacatttcggtgaatatccacatccttatggctttgaaagtcttctgctgacatttctgcaggatacatttctgtttttttgttttttaagacggagtttcgctcttgttgcccaggctggagttcagtggcacaatttcagctcactgcaacctctgcctcctgggttcaaatgattctcctgcctcagcctcccgagtagctggaattacaagcacctgccaccacgcccagctaactttttgtatttttagtagagacagggtttcaccattttggcgaggctgatctcgaactcctgacctccggtgatctacctgccttggcctcccaattgctgggattacaggtgtgagccactgcacccggccaggagacatttcttgaaagagaattcctaggaaaaaataatacgtatttttaaaaattgctcccctccaaaaaattaaaatacttaagtttactataacaatgtaactaaatgatcccatccttgaacattctgtaaaacctatccaccttcctttgtctacttttgtctgtaatgtaaaccggactctggtggtggtgtttcatgtgagaattttaggaatattgatctttctgtctggctttaagacaaagaccgccctacagctaatgtatcatagctgacccttctgtctaaagtcatttgtcatcttgtaattttcagatgacttgcaccgttggtttaacaggaagaaaacctctttcagagaggcatgcgcagtgcccgagcctcaggagagcggctctgaagagcacctgcctctgagccagttcaccacagtggaccgtgaagccatttgggccgaagtggagaaggagcccgagaagtacccgctgcgaggcgagctgagcgaggaagagctgccctactacgtggagcttccagacaggacggcccacggcgccccggacagcagcgagcacaccgagtctgcagatacaagctcctgccacacggacagcgagaacacgtcctccttctcctccccttcccacgacctgcaggagctgagcaacgaagagaactgctgtgcacccatccccatggggggcagggcgtaccccaagcgctcggccctgctggcggccttccagtcagaaagcttcaaggctggggccaagttaagcctggtgcgggtggactcggacaagacgcaggcttctgagtcgttctccagcgacgaggaggcggacttggagctccaggccctcaccacatccaggctgctaaagcagcagcgggaaaggcaggaggccgtcgaggccttgttcaagcacatcctgctctacctgcagccctacgactctcggcgggtcctctatgccttctcggtgctggaggctgtgctcaaaaccaaccctaaggaattcatcgaggctgtgtccaggactagcatggataccagctccaccgcgcacctcaacctcatctccaacctcctcgctcgccaccaggaggccctcattggccagagtttctacggaaagctccagacccaggtccccaacgtgtgcccccactctctgctcctggagctgctcacctacctctgcctgagcttcctgcgctcctactacccttgctatttgaaggtctcgcaccgagacattctcggcaaccgggacgtgcaggtcaaaagtgtcgaggttttgatcaggataatgatgcagctggtctcagtggccaagtcttcggaagggaagaacgtggagttcatccacagcttgctgcagaggtgcaaagttcaggagtttgtcctgctctccctgtcggcgtccatgtacacgagccagaagcgctacgggctggccaccgcccaccacggcagggccctgccagaggacagcctctttgaggagagtctcattaacttgggtcaggaccagatctggagtgagcacccgctgcagattgagctgctgaagctgctgcaggtgctgattgtcttggaacaccacctgggtcgggcccatgaggaggcggaaaaccagcccgacctgtcccgggagtggcagagagccctgaacttccagcaggccatcagcgccctgcagtacgtgcagccccaccccctcacctcccagggtcttctggtctctgcggtggtgaggggtctgcagcccgcctacggttacggcatgcatccggcctgggtgagcttggtcacgcattccttgccctacttcggaaagtccctgggctggacggtgacaccctttgttgtccagatttgcaaaaacttggatgacttggtcaagcagtatgaaagcgaatctgtgaagctctctgtcaggtgcgttacgctccttgtgacatctttattgctttagtgatggtttttataacgaatgactgttttgccacggatgtggatgtcggttggaggataatttcatcccaatgagaagcctgtttagcattatcaagaggggtaacaagcaactaaatgttctgatccattatgttatgttatgttatgttatgttatgttatgttatgttatgttatgttatttttgagacagagtctctgtcacccaggctggagtgcagtggcatgacctcagctcactgcaacctctgcctcccaggttcaaacaattctcctgtctcagcctcccgagtagctgggattacaggtgcctaccgccacatctggctaattttttgtattttagtagacacggggtttcaccgtgttgcccatgctggtcttgaactcctgagctcaggcaatccccctgcctcggcctcccaaagtgctggggtgctagagggagccactgcgcccagccctgatcctttatttcaaatccgcacaggtacccagtctagctcagtgttgcagggcatgtcagctactctctactatttttgcaaaacagaaataaaaatgtgaatcatcttcacagaaattctaaaacattgaaaccatttttccaaagtgactatatgaatgtaaaatcacacaaaggatggttaacattattataatgatattctatgacgagagctccagtttatttgggatggtgatctctccctagttcctgtgtttatatataggattagaaacccttatggcctcattctttaaaaattctcaaaccagtttctcttttcttcaccacagcacaacctccaagagggaaaacatttctccagattatccactcacccttctagaaggtctaacgaccattagtcatttttgtcttttggaacaagccaaccaaaacaaaaaggtaaatttttttttttcctgagttcaaggcaattttcatgtattgttttgtctttgggctatgactgtttcaaataagtaacgtatgtatgtaatgtctgtaactaatatgcgtatggaggtgatgcaaatgtgaatgcaaatattacataagtcacgtacacacgtatgcaaatgcatgtgtgttagcaatgcaagtgcctacgcaaatgcatatgcaaatgcatgtatataattaacgcaaatgcataagtatgtatgtcagccatgcaaacatagttttcttcctgctggcactccctgtgccagccctttgcccattgttccatcagtagcctgtgagataacttataaagccacttgtttgattttaggcttatagtcatctttttccatgtattttttacttgctatcatggtgttcatgaaatctgagtaggcagacattttagctgttggttattctaccctgtagaataccctgggattaagtcttagaatacatctaacactttggttgaatggttgaaaagtttgtaatttagaacatcagactcacagctgtctctgtgaaagagaaccatgggttgaaatgcacagagaagcttattgctcccagaccaccacatgtatgagttgcttagaagagagtccaacagcccagacctaatcccgctagcactgctgccctcgtgggaagaaaaaccattccacagacacagcctgcctcatgtattcattttaatttttagaccatggctgcaggtgatcctgccaacttgaggaatgccagaaatgccattttggaagagctgcctcgaactgttaacaccatggcccttctctggaatgttctcagaaaggaggagactcaaaagagacctgtcgatctcctaggggccacgaagggatcctcttccgtttactttaaaaccaccaaagtaagaggatgtctctgtagttctgtcatttacttggtcttgtattgttccacccaaaataaatgtgtataggaaagtgtgcatgataaacagatgtgctcaatgaaacccaagtcagagatcagaagtagaaatctctagttcatttgttatcagtaagtttcctatacctgaaatggaggagtctgagtggtttcagcctgttttcttcttattttccattcaccttattttgtagttaaaaataaagtcttggccgggcatggtagctcacacctgtaatcccagcactttgggaggccaaggcggatggatctcctgaggtcaggagttcaagaacagcctggccaacatggtgaaaccccatctctactaaaaatacaaaaattagccaggtgtggtagcacgtgtctgtaatcccagctactcaggaggccgaggcaggaaaatcgctggaacctgggaggcggaggttgcagtgagccaagattgcaccactgcaccccagcctgggcaacagagcaaaaccccatctcaaaaaaaaataaaaataattaaaataaataaagtctctagagctaggcgcggtggctcatgcttgtaatcccagcactttgggaggccaagatggggtggattgcttgagctcaggagttcaagaccagcctggccaacatggcgaaaccccatctctacaaaaaatacaaaaattagctgggtatggtggcaggcacctgtagtccgagctactcaggaggccgaggcaagaggattgcttgagcctgggaggtggaggttgaagtgagctgagatcacgccagtgcactcaagcctgggtgacagagtgagaccctgtctcaaaaacaatagtctctagtggttcaaagcggggatacctagatcctcacctctaaatgatctagagaccccagccttgagtctctaaagcatttctgcgagacagctcatctctgttctgcttttagcggtgcctgtcaaacatggccccatcagagtggaatgtcagggtgcctttgagttcttaaaccaaaaacgcacaactgtgaatatttatattatagtttagtctttggttttcagtgtctgcctcagaaggctgtaggcgcaggactcggtcgctcaccatctgtgttactgtgtgtggcatctcagaattatctgccacatctgacatcagttgagagcccccaggtgccagatgtggccgcagggatgagccttgccatcctgcatttaggtaccacggtgcgttgttggcctccagacattctgtcggttcctagggtgccaagggaattctgtatttcaagctcctataagaacctgctcttaaaaagattcagaaaaccttttttctcactcagaaaaaaagattttctaaaccttttttaggggagcttcctgtagcactcagcctctctgagcctccatttcctcgtctgttaaaccaggctgtggctagcatcctgtcctcatgggttgagggaaagagtaattacgataaaggccgatgctcattaggcacttaactcctagccctccctgaggaacccagggccggggagcgggaccccacattagtccctctagagcagaagccatggtggaaaagaggggacagctccattgctggctcagttgtatctaatgtgaaataaacatgggcggttgtcacaggaagcgctgggtaaatccgtctcttcgacagacattttgtgcctgctgccacgcaccaggctctcttgctttaccggtggacaagagagatgaagtccctgcccctgtggcagaggcagacattaactggcagtgtaataacgatgtgagcagggcttcaaagaaacacagggtttcctgagagtgtgtgaacaggaggcctggcctgacctggggttcctgaggcggcatggcttagctgaggccccaggcggagaggatttaactacggtgggcactgcaggctgagagagcggtaggatttacagagcgagaaacgtggcgggaacacagagaaattcataagtagcaaaacagagggtgctgagtgacatcaggaccatgttacaggtttaaattgattacctgataaaattagttaaatggtgcttatttctggaaattgagcaacaactttcctaatgaatataagcccttccgcagcagatggagtcaggctgaggctgtggggtttccagatggaagcagtgctgcaaagccttgcccggcttcctgcaagacccccactgtgctcacagcagcaagggtgatattcatcgtctcccgagatgctcctggccaatcgagctggccatccgtctctccaccttggctgctcactgccccttccccccgccggcatgacacgccaacatcacacatctagctccttgcggaaagggtttgattcctcccattgctgggatccacccatcagggaagcacctcagcacaacattgggcacaaacatgacagggtccttgctctcggtatggacagcagtggtggttcaatgtatatgatgccatagccccaatattactctgcagtaacttttttttccctattttctagaccataagacaaaaaattttagacttcttaaaccccttgacggcccatcttggggttcagttgacagcggctgttgcggcagtgtggagcagaaagaaagcccagcgtcacagtaagatgaaggtaaagtttaaaaagttacaggagtggttaaacttactgtgacaaagaaataccacagaatcatgtggaatcaaaggtgacattggaagccagcatgggaaactattgagttgatttaatcattttatcttattttatttctttatctatttgagatggagtctctctcttttcacccaggctggagtgcagtggtgcgatcttggctcactgcaccctccacctcctgggttcaagtcattctcctgcctcagcctcccatgtaactggaattataggtgcccgccaccacacccggctaatttttgtattttttagtagagacagggtttcgccatgttggccaggctggtcttgaactcctgacctcaggtgacccacccacctcggcctcctaaagtgctgggattacaggcgtgagccaccacaccttgccgatttcatcatttgaaatgcatgagataatatagctgtgtctcagtacaagtagaatgtgtattgggcaggtagggaagagcgcacctgacttctgttttctaatttttctgtaatgagtatatagtacttgtgtttaatctttttaaatctaaaatacatataagagtatatataacatgaacatttttaaagaataaaaatggcacagtggctcacacctataatctcaacactttgggaggccaagacgggcagatcgcttgagtctaggagtttgagaccagcctgggcaatatggcaaaaaattagccgggcgtggtgttgtgcacctatagtcccagctactcaagaggctaaggtgggaggatcacttgagcctgggaggtggagggtgcagtgagccatgattgtgccactgcattccagcctgggcgacaaagcaagtccctatctaaaaaaaaaaaactttacctaagaacatgccacccatttggcttaagaaatggtcacttatcctagcactgtgggcctttttttatttgtagtaccatcttattgcttttttaatgtgtagaaatcacacttgttagctgggcatggtggtatgcgcctatagtcctagttacttgggaggctgagatggaaggatcacttgaagccaggaatatgaagctgcagtgagctacgattgtgccactgcactctagcctagacaacagagtgacacttcatgtaaaaaaaaaaaaaaaaaaggaaattacatttgtccatgataataaagaaaattgaaatcaccaatcatatttctatgcccaaagataatttctttttttttttttctattgagacagagcgatctcagctcactgcaacctctgcctcctgagtttaagcaattctcctgcctcagcctcctgagcagctgggattacaggtgcatgccaccacactcagctaatttttgtaattttagtaaagacggtttcaccatgttggccaggctggtctcaaactcctgacctcgtgatccgcctgcctcggcctcccaaggtgctgggattacaggcgtgagcccaaagataatatcagtttgtattttgcccgttctttatccacttgactggtccatgatgaagtcctgcaggggtcggcttacctttttcaacctcaatcctcttcctttgttccctcccacccctgctccatcccctgctcgggatctgctgctgcacctccttgacactcccccagtgctcagcctttgtggcagacatgggcgcctgttctctgaggaagagtcagtggtcagtgtccaaggccaccctcctgagcgcctgtcggctccttccctggtgaggaacctggtgctagttgtttttcttccaaatgcccatgaccagggtatgcagacttctgtcatcaaaaatatgcctcccataccagggctttccttccaaggctagcaaatgggagcctggtttatctgtttttacttcctgtcttcgtatttttgattccatctcttgtttccttcaaatttagtatatttgtttctaaaatgctttctactaaattcaaacataccactattacagccccatcatggcctgcaccttttattcctaatttgtatcaaattatgttgttcccctgggtggagcctttacctagttcaataggaaatgtttgtttaagagattaaaacaggccgggcgcggtggcggctcatgcctgtaatcccagcactttggaagaccgaggcgggcagatcacctgaggtcgggagtttgagaccagcctagccaacatggcgaaacctcatctctactaaaaatacaaaacttagctgggcgtggtggtggccaagatcgcaccactgcactccagcctgggtgacagagtgagaccgtgtttcaaaaaaaaaaaaaaagagatgaaaacagattgatttctccagggacgactactgtagaatacaataaggatgtgtcatccttatttttactttctctctataagctttcaaggaacttttttttttcttggcagattatcccaacggcaagtgcatcccagctaacccttgtcgacttggtgtgtgcactcagcaccctgcagactgacacgctgctgcacctggtgaaggaggtggtgaagaggccaccccaagtcaaagggggtgatgaggtgaggagcctggggaagcctctgggcttctgcagattagtgggtggcatttgtcataactctacttccttataaatcgtgtttgggagggaaggataggtaacaagagctagtgggaatgcttggggtagtgaagtggaggtgctgtttgctgtgctttgggggagacctatgaagatctggtgcttcttttttaagttgggaactgcctgaggtcaggggctctcattccttgtaccctgctgctgaggacactgcctggtacatgggttagcgccttctgggcaccaagtggaataaaatctttagaaagaggaaatggcacctgcctcaaggagctcgcagccataaagatgccaaagataaacaaaaccagactctagtgaaagatggtaaagacagatgtgattcaataaccactgcggtaagggaaagtgttgggttcagtttagatttgtgtggagatgactgggaaaggatgagggaggagggagggggaaggagcaggaagtttaaggagagttggagaagtagaaaattacaaaagagcaggtggggaggctgctcagtccatagatgtgattaggccatctgggtttgctaactggggcttatccaaatgaggctcctaccctcccacagaggctgggagatcgagactctgtctttcttgatgattctgtttcaaagggatggctcccaggtccttgagaaacacattcctaggttgtgggagacacatacacatctcaaagggacagagaaagtatttatcattgtaaacttaaaagaaaatgctctaagaaagggaggtcaggggtctcgcaggaacaaacagtaaattatttggcaaccttgagctttctcggacaagtgtttgaagaggactggtgtccccatcctagggatccatgctagtgttgtttggggctgtgggggtggacagaatcatttgtcaagcagagggctcagaggagcctagctagaatcagctcaaggagagagtctttgtcaagggcaaattaaaatttgtgtaacttttttttttttttttttttgagacacagtttcactctgtcacccaggctggagtgcagtggtgcgatctcagctcattgcaacctccacctcctgggctcaagtgattcttgtgcctcagcctcctgggtagctgggagtacaggtgcatgctatcactcctggctaacttttggttttgttttgttttgtttagttttttcgagatgaagtctcactttgtcgcccaggctggagtacagtggtgcaatctcagcccactgcaaccccgcccctggggttcaagtgattcttgtgtctcagcttcctgagtagctgggattacaggtgcgcaccaccaagcccggctaatttttgtatttttttttttcttttagtagagacgggattttgctatgttggccagactggtcttgaactccacttgccttggcctcccgaagtcctgggattacaggcgtgagccaccgtgcccggccaaaatttgcataattttttttaaaacttttttttttttaagacaggatctcactgtcacccaggctgcagtgcagtggcacaatcacagctcaccatagcctcgacctccccaggctcaaatgatcttcccaaatagctgagaccacacatgcacaccaccacacctggctaatttttatattttttgtagtgacggggtttgccacattgcccaggctggtctggaactcctaggctcaagcaatcctcctgcctcggcctcccaaagtgctgggattacgggcgagagccaccatgcctggctgcataattttttataaaggtagaaaataaatgtcagagaacataactaatgatagacactctgagaaagaggagatttcatctggctgctgtgaaacagaaaccttcagggtgatgtcattgaaccgagaagttccttgtaatttttctgctcaatttcattacagcagcctggagggcccatgttgtctagagagcttcttcaattatacacggtggatttaaaacagggcaagctgtgtggtttaatatttgcattcccttagagtcttctatttctgtttttaccaaagcagtcttcatcattgaaagcagcagagctgttttgctcttaattaactaatttaataaaaaccagggatttatttcaatcttgaaataattgccttctgtcgaacagtttaaaatcatacagttagcaaaaatttaagaataatctaaatgaaaattaggggggccgggcatggtggctcatgcctgtagtcctagcactttagtccaggagttcgagaccagcctgggcaatgtagggagacatcatctctacagtaaatttaaaaattagctgggtgtggtagtgcacacctgtagtcccagccacttgggaggctgagacaggaggatcagttgagcacaggagttcgaggttgcagtgagctatgattgagccactgcactccagcctgggtgacagagtgagaccctgtccaaaaaaaagaaaattcgtgcaatggaaaaagtgattattaaaaaatatagctatacttgaacaggtgtttgtgtaccgatgttcatagcagcattattcacagcagccaaaaggtggacgcaatccctgtgtgtctcagtgggtgtgcggataacaaagtgagatctgtgcgtgcagcgcgttagtactcagcctcgagaggaatgaaattctgacacgtgctacacaacatggatgtcagatcctcaacatggatgaaccttgaagacattaagttgaatgaaataagccagtcacaagaggactaacacagttctatatctggaaaaaaaaaaacaactgtgtcctcactcaacaacataacaatcaacacagaagacttctcttaccccaaatatgcggggagttctccccaccagcaagcaagcaattgattccgcagtggacaccagttgggtgtcctccaattcaattcctactctatctgcttggagatagtgtcagatcccacagggtgagggctcagtccccaagagcacccttcacttcagacaccagtcacaagtctgggcctctggaacttctgactgactagcttcaagttgggattcccacgaaccccctctttgggttcagttaatttgtcagagcagctcccagaactccagaaacacgtttactggtttattataaaggctactactgaggatacaaatgaagggatgcgtagggcaaggtatgggggaagaggtgcagagctcctgtgccctccgtgggcacagaaccttcatgtgctctgctctctggaagctcaccaaacccagtcctcttgggccttttatggaaacttcattggatgggtatgactaaagcatggacaaccgtgtcgaagtgtgattggacaaaaagagtgtgatctaatacttaatacagtgactggggaaacctagcagggcctgcctgttcagattcttcttggcctgtctgcacagcactgcttcctccagggtgtgggacaggaccctctccagaatgagggtcttatgaaccgtagtcagattagagtcctgccttggggcaggtcaaaggagggcaggagttatgaaccaagaactgcagacaaacacgtaaaaacataggttgatacgtagatagatgatagatagatagatagatagatagatagatagatagatagatagaagtagttaggtaaatagatagatgtaggtaggtaggtagatgtaggtaggtaggtagagagatggatgtaggtaggtaggtaggtagatagatgtaggtaggtaggtagatgtaggtaggtaggtagagagatgtaggtaggtaggtaggtagatgtagggtaggtatgtagatagatgtaggtaggtaggtagatgtagataggtaggtaggtagagagatagatgtaggtagatgtagttaggtaggtaggtagatgtaggtaggtagatagatgtaggtacgtaggtagatagggagatagatgtaggtagatgtaggtaggtaggtagatgtaggtaggtaggtagatgtaggtaggtaggtagataggtagagagatagatgtagttagatgtaggtaggtagatagatgtaggtaggtaggtagatgtaggtagatagatagatagatgtaggtaggtagatagatattatgattttagagtgttaaagggtggctcactcctgtaatcccagcactttgggaagccgaagcagggggattgcttgagcccagaagtttaagaccagcctgggcaacaaagtaaaaccttgactctaaaaagaaaaaaaaaattagccaggcatggtatgcacctgtagcctcagctacttgggaggctgaggtgggagaatcacttgagccagggaagttgaagctgcattgagtcaagatcacgccactgcactccagtacagagcaagaccctgtctgaaaacaaaagaaagactttttttttttttcacatcagacaatgtgccgaccattgtaacaaagtttgagggtggcacatatcacgcatgtgcgtgaacacccaatcatcacactaatgaactgcagatgaatcggaagacttttttttcagccatttttttcagcctcacatatgacacggggcagccccctatagaaatgtccaggccccgagggcctggccgttgggcgtcacccagtcagttatcctccagctcctggtctcttccttcgttccagtgttaatcgacaatgctctatgtgcactgagtggtgtcgtggaggctaaatagtggaaaaagcaattcctgccctcagtcctcctatattctaggttggcaaagaagagagaagagaagagaagccatcctaaaaaataacagcactgcgaggccaggttatggagcgagctcagtcagtgcttaaggcttcgaatgtaaaaggacccggatgacttccacagtatttcttggggatctggcccaggtctcccaatcttccaagaacgtatggtcatcctgttgcctttcactgtttttttttttttttttttttgagacgaagtcttgctctgtcgcccaggctggcgcaatctcggctcactgcaagctccacctcccaggttcatgccattctcctgcctcagcctccctagtagctgggactacagtcgcccgccaccacgcccggctaattttttgtatttttagtagagacagggtttcaccgtgttagctaggatggtctcgatctcctgaccacgtgatccacccgcctcggcttcccaaagtgctgggattacaggcgtgagccactgcgcccgggcttttttttttttttctttttttttgagatggagtctcgctctgttgcctagcctagagtgcagtggcgtgatcttggttcactgcaacctctgcctcctgggttcaagcaattgtcctgcctctgcctcctgagtagctgggattacaggcttgcgccaccatgcccagttaatttttttgtatttttagtagagatggggttttgccatgttggccacgctggtcttgaatgcctgacctcaagtgatccacccgccttggcttcccaaacttccgggattataggtgtgagccaccgtgcctggcctcctttcattcttgtccataaatgttaggagtgggaatggtgctccacagggcggtctgtgctgctgcaggcttggtcgccgtagaaccaaggggttcttcgaggtcctgaagacagctctgcagaggctatgacagccagagcgagtgtgtttaggttgtattccttcacattacttgaatttctacaaatacctgcaatttctagtctttcctgggctataaaggaaccggattttatctagctgactgatttttggcggttcaaataacaaaactacattttgtggttagtttagttaattaatagctgcaaatagctttttacaagcaaggagggggtaaaatatgtgttttagaacttgtttccaagtagttccagccacagggtttttggggaagctgtctgagctgggcttggagtcatcttctaaactaagaactagaattttttggccgggtgcggtggttctacttgggaggctgaggcacgaggatcgcttgaacctgggaagcggaggttgcagtgagctgagattgcaccagtgtactccagcctgggcaacagagcaagactcttgtaaaaagaaaaaaaaaaaaggaaagaaggaatgcaaagaaagaaaaaggaaagggaagggaagggggaagggaaggggaagggaagggaggaagggagggaggaaggaaggaaggaaagaaagaaagaaagaaagaaagaaagaagaattagaattttttcttgcctcttggtaatcatatgcattcactggagtcaacactggccctagctttctgtttgggaagttcggttacagtgccaattttcccgaaatgcctgttgacgcctggaatgtaaagtaggtgcacagggtgggagatcactgtagaagtctaaggggatgtgaatgatttggggactcataggacacacttgttttaattgtacatgatgggcactatcatgtctgttgttatatctgaaagattctttagtcaaaaacctttgctttgttaggctatagatctgtttcattttgtatctgaattcttttagccttatttcccaccaactcggagtaattggttttactttcattttcagaaatcgcccctagtggacattcctgtgttgcagttttgctatgcttttctccaaaggtaatacagtcccccgtcctccaaaaacttccttaaatacagatgctattgcagtgagcatgcataataaatatctggttttatttctagactactagagagccattgttcagaaaatatcttaaagttgtcataatttcttcccaaggtattgatctatgcttttccttctccagagagttaacatcttaaaatctgtgcagcgtactttgaacactttatatgagcgaagctttatgtgaggcctgttaaactttaaaaggcttggatttgcattaaattgatacagaaaaagaaaaaaaccacatatagggaagtgttaaagacctcttttagaaaaaggagaaatgggccaggcgcggtggctcacacctgcaatcccagcactttgggaggtggaggcaggcggatcacttgaggccaggagtttgagaccagcctagtcaacatggtgaaaccctatctctactaaaaatacaaaaattagtccggcatggtggcgtgcgcctgtaatcccagctactcgggaggctgaggcaggagaattgcatgaacccaggaggcggaggttgcagcgagccaagacctcaccactgctctccagcctgggtgacagagcaaggctctgtctcaaaaaaaaaaaaaaaaaaaaggcaaaatgattgtttctggtggcgttctcagtgtgccttcccatgttttatgtggagaggtatctgctttgatttgctaagttaatatatgtattaggtgtctcagctaagagagcattaaaggggattccgcaggtttttccccatggatgaaaaagaagctttactggacctcattcagatcttacaatggctgcatcccaggtgcagctctgtgttgcagaaaatgagggtgaggtggctgggtgcggtggctcaacgcctgtaatcccagcactttgggaggctagagtgggtgagtcacttgaggccaggagtttgagaccagcctggccaacgtggtaaaaccctatgtctactaaaactacaaaaaattagccagggcttggtggcagcatgcctgtagtcccagctactcgggaagctgaggcaggtgaatcacttgaacccaggaggcagaggttgcagtgagctgagatcacaccactgcactccaggctgggggacagaatgagactctatctcaaaaaggaaaaaaaatgggggtgggaagggtatagaccacttctcagggaagcctcactatgcctacatagccatcaggagtctcactgtaaataactccaacaaccaggcacaggctccttgattcacacagttaacattacatagttattcccactcaccacattctgaagttgcaggacggtaaattgaggcctcctggtagatgaccagggtggggttaaattcagaccacttcccttgtgagcatcattgttgttctttcctccaggagttaaagatgagccggtcacttccctcctgtgacagcgaatatatattgcgttgctggcgaatgttgagtgtagtggcctgagggacagctgagctttcccaggagctgcaggttagatttggtcatcctccttttgcagaggagaaaccgcctaggtcacacaataggtagtaagttggagaaccaggacttggacctgggacactctgactgtagtctgagctttcactgcctggactgtgcttcctcgctttggagcggtgatctcagaatcctcatcctgagagctacagagcggggtaggccagtttcctggtgagtgtcctgggacctaatgctttgcagccttctgacaggtgatgctgtgttaccagccacttcagggaagcagaatattagcactagaaaggcctgagagatcagccgggcacggtggctcacgcttgtaatcccagcactttgggtgaccgaggcaagtggatttacttgaggccaggagttcaagaccagcctggccaacatggtgaaaccctactaatctctactaaaaatacaaaaaattagcccagtgtgttggcccgcgcctatactcccagcttgggaggctgaagaacgagaatcgcttaaacccggggggcagaggttgcagtgagctcagatcgtgccactgcactccagcctgggtgacagagcaagactctatcttaaaaaacaataataaaataaataaataaataaataaaataaaataaaataaaatagaagaaaggccgggcgcagtggctcacgcctgtaatcccagcactttgggaggccgaggcgggtggatcacctgaggtcgggagttcgagatcagcctgggcaacacggtgaaaccccgtcgctactaaaaatacaaaattagccgagcgtggtggcacatgcctgtaatcccagctattcgggaggctgaggcaggagaatcgcttgaacctgggaggcgaaggatgcagtgagccgagatcacgccattgcactccagcctgggcaacaaaagtaaatctccgtctcaccaaaaaaaaaaaaaaaaaggcctgagaggtcaaggtcgatcatctaatttaaggcttttattttagagacaaagaaaccaggagtatctcacctgccagcagtaggatttcaggttctcaaactccaagtgtttgccagaataccaaagtttagctcatgtacattgtaagtttttaaaaagaaaaaggtcagtgaggtatgctgtttaccctttgctttccaactgccaggatcttaaatatgcttataaataaatgtattttgacttgttcgtggttgagtatttttcctatcttttaaaaaaacaggctcccagtaccagccttgcaagagaacttttcttcactgttgggagtattgaaagagtctgtacagttgaatctagccccacctgggtattttctgcttctcaggtatcatgtcaccacattgtcattgtgtaatattttctcttggcacatattttatttctgcagcatttttaatctgaagctgattgtctcccaacagcatgctgaatgactttgtaacaagaactcccaacctggaaaacaagaaggaccaaaaagacctgcaggtttgtatatgaaagaggttcagccaaatgatattaccccagcagtgctgtcctcctttgggggatatcagatagcaggtagacaagagacattggacagaatctgaggttagctttgcacttgttctcaagtcttacttctgccatcactgtctctagagagttcggacagtcccggggcccgggttttctgatgaaggttcttgtgtaatgcttgagcaatcgattgtggaattgacagctgcacccctcaccctccacactgtatgcagatgtatgtggatctcactgtaaaacataaatggaataagaaatcttatttccccccagacgcggtggcgcatacttgtaatcccagtactttgggaggctgaggcgggcagattgcttaagctcaggagtttgagaccaatctgggtaacatagtgagacctcatctctacaaaagtacaaaaattagcctagtgtgatagctacacctatagtcccagctacttgggaggctaaggatcccttgagcctgggaggttgaggctgtagtgagctgtgatcacaccactgcacttcagcctggcaacagagagagatcctgtctcaaaaaaattttttaaaaaaggaagctatctccatacatggatatttctttttttcttttttttttttttgggccagggggttggacagaatctcactccatcacccaggctagagtgcagtggcacggtctcagctcactgaaacctccacctctggggttcaagcgattcttctgcctcagtctcccaagtagctgagattacagacatgccaccacgcccggctaattttttgtatttttagtagaggcgggctttctccatgttggctggtctggtctcagactcctgacctcaggtgatcctcctaccttggcctcccaaagtgctgggattacagacgtgagctaccacacccagcctccatacatggatttctttccttaaacgccttatcccccattataacagtaatatatgctcataacaatttgtttaatactgaaaaataaaactcatcataggagaaggaaaactcagagtggaatgccaactaataaatacggaagttatgatgaagttggaaaaatcactgttttgcaaaccattatagacattgattcagttggcttttctatcacatttatagccttggcgatactactgctaatctttatgatccctggcatttgtgaaaggtatatccagaaacagcctcaggtccacagttctgaaccacaagagtactgtataaagtgcagtaggccgtgtgcggtggctcacgcctgcaatcccagcactttgggaggccaaggtgggcggatcacctgaggtcaggggttcaagaccagcctggccaacatggtgaaaccccacctctactgaaaatacaaaaattagccatgcctggtggcggatgcctataatcccagctactcaggaggctgaggcaggagaatcgcttgaacctgggaggcagaggttacagtgagccgagatctcaccaccgtactccagcctgggcaacaagcgtgaaacttcgtctcaaaaacaaaaaacaaaaaaacaaaaacaccataaagcataattagaaaattccagtgcctcctcctttggccttgacttgtagccagagaagaaaacgttacaatgccgatgctgcacgtccaggtgctgggatagcacttgctcacctaagccctccctgctttcgtggcctgttgcctgtagcaggcccctctgtcttcagccagcctggacagggctctggccacaggcattccctccgttgttgcagctggcatgcctcttctctgctccttttggttgcggggaccaggtggcatctgcttctttctgtctcatgacacctggcctccccgccactaattccttcctactgttttgagcgacaccctatgcttcttccccactgaggatatagaaaaaaacaaagtgtgattttcctaccacactctcgtaacatagaatccttctgtgacctcgtaaccaaaatgtgtgggaattgcttcccaccagcaaccaagctagtagttctgcagtggacactagataggcaccgtccaattccattcaattctggcattccccacctagagatagcttgagatcctgcaggttgagggctcagtcccacaagactgccccaccccctcagatgccaatcacaagccccaagtggtttcatctgtgcttttgacagaccagctctaaactggggttctcactacccaccccttgggttctgttaattagctggagtggctgatggaactcagggaacacattgaacagtttattttatttatttatttatttttttgagacagagtcttgctcttgttgcccaagctggagtgcaatggcacgatctcagctcactgcaacctccgcctcccaggttcaagcgattctcttgcctcagcctcccgagtagctgggattacaggtgcccgccacaatgccagctaatttttgtatttttagtagaggtggggtttcaccatgttggccaggctggtctcgaactcgtgacctcgtgatccagccgcctcagcctcccaaagtgctggaattacaggcatgagccaccacacccggctgaccagtttattataaaggagattagaaaggatacagatgaagcgatgatcaggcaaggtacgtgggaaggggcacagagcttccatgccctcctagggcaccaccctctaggaacctccacatgtttagccatccagaagctcatccgaacccagttactttggggtttgtggaagcttcattacataggcatgatggattaaatcactggtcattggtgatcaatttaacctttagcccctctccccttcctggaggttggggagctgaagttctctgggggcccccagccacaaccatctaagacacgtattactttggagaatccaaggaatttaggagttatagctgggaaatggggagaaaggccaaaaacatttccacaatatcacacccgtccactcagtgctttcatcagtccttacgggaactcctctaagcccctaatcccttttcctgactttccttgtgcccttcacaccctgccctgcctaagttagccaattcgccacttccctcgagcgcacccttctctcacccagcaggcaggtgtgccctgcttcacacctcaacacaactgctgagcctaggaaccgtgtggcacagttgaggtcaggattataaaattctcggatgtcaaggattatagccactcgtagctggtgacacttgatgacactggctgagaagcctgcttcgagtttctgtctctccagctactaaccagattctttactgatcatactcctgagagtggatgactcctcacttcaccccactgagtcagtttaacttactgacctttatttcttgtatattattgaaagatgcatttctaggaagaacccgtggtcctagagaaaccagaaagccaatccactgaatacaatttatggttttttcatcagcgtgctgcaatgacttgtgttctctgtatattttacctacattggccagtatagtagccgttagccacaggtggctgttgagcacttgaagtgtggctagtctgcagcctgggcaacatagggagaccccatctctacaagaaatttaaaaattatccagatgtggtggcatgcacctgtagtcccagctacctgggagcctaaggatggcttgagcccaggaggtcgaggctgcagtgagacttttttttttttttttttgagatggagtcttgctctgttattgggggaactcacccccagtatttcaatgtaggttctttctattttccgtaagtgtcggccggctgagaaataaagggacacagtataaagagaggaatgttacagctgggccaccaggggtgacatcacgtatcagtaggaccgtgatgccctcctgagcctcaaaccagcaagtttttattaagggtttcaaaaggggagggggtgtaagaacagggagtaggtacagagatcacatgcttcaaagggcaaaaagcagaactaataataagggtctaacaaagatcacatacttttgagggaacaggacaaagggcaaaagcagaactactgataagggtctatgttcagcggtgcacgtattgtcttgataaacatcttatcttaacagaaaacagcgttggagagcagagaaccggtctgaccacagatttaccaggatggagtttttccccactctagtaagcctgagggtactgcaggagaccagggcgtatctcagtccttatctcaaccgcataagacagacattcccacagtggctgtttatagacctcaccccaggaatgcattcctttcccagggtattaatattaatattccttgctaggaaaagaatttagcgatatcttccctacttgcacgtctgtttataggctctctgcaagaagaaaaatatggctcttttttcccaaccccacaggcagtcagaccttatggttgtcttcccttgttccctaaaaatcactgttactctgttctttttcaaggtgcactggtttcatattgttcaaacacacgttttacaatcaatttgtacagttaacacaattatcacagtggtcctgccatgatgtacatcctcagcttatgaagataacaggattaagagattaaagacaggtgtaagaaattacaaaagtattatttgggaactgataaatgtccatattaaaatgaaatcttcacaatttatgttcctttgctgcggctccagtcggtccctttgttcggggtcgctgacttcccgcaacactctgtcaccaggctggagtgcagtggcactatcttggctcaccacaagctctgtcatctgggttcaaatgattctcctgcctcagcctcccaggtagctgggattacaggcgtgcaccaccacgcctagctaatttttgtatttttagcagagacggggtttcaccatgttggccatcatggtctcaatctcttgaccttgtgatccgcctgcctcggcctcccaaagtgctgggattacaggcgtgagccaccgcgcccggctgcagtgagtcttgattgcaccactacactccagcctggttgacagagcaagaccctgtcctgcccaccacctcctaaaaagaaaaatgtggtagtctgaattgaatgcactgtaagtgcaaaacacacattggatttcagacttagggcacacacaaaagagaatgcaaaatctgattaataggttgtttttgttttttctttttgagacgaagtttcgctcctgttgcccaggctggagtgcaatggcatgatctaggctcactgcaacctccacctcccgggttcaagtgtttctcttgcctcagcctccaaagtagctgggattacaggcatgcaccaccacacccacctaattttgtattcttactagagacagggtttcaccatgttggtcaggctggtctcaaacgcctgacctcaggtgatccgcccgcctcagcctcccaaaatgctgagattataggcatgagccaccacacctagcgtattaataatttttatattgagtgcatgttgataatattttgtatatattgggttaaataaaatacattattaattttttttttgaaacgaagtctcactctgtcatccagactggagtgcagtggcatgatctcagctcactgcagcttccacttcctgggatcaagcgattctcttgcctaagcctcccgagtactgggactacaggcatgtgccatcatgcccagctaatttttgtattttttttagtagagacagggtttcaccatgttggccaggatggtctcaaactcctgacctcaagtgatccccctgcctcagcctcagcctcccaaagtgctgggattacaggcatgagccactgcacccagcctatattattaatttaactttaactgtttatttttaccttcaatgtggctcctagaaagcttaatggtacgtatatgctcacagctgtggcctgcattttatttctactggacagtgctgttttaggcacttaacattcttttccttaattaacttcctttccccctcctcctgataattctcaggaaatcactcagaaaatcctagaagctgtggggaacattgccggctcttccttggagcaaaccagctggctaagcagaaacctggaagtgaaggcccaacctcaggcctctctagaagaatctgatgctgaggaggacctgtatggtaggtggagatgggttggctgatagtgcctctggtcagcgcgtggttctggcttttccttaagagagatcttgagtgttctcaccacaaaaagaaagaaagtacttaaggtaggctgggtgcggtggctcacgcctgtaatcccagcactttgggagaccgagatgggcagataaagcaaggtcaggagtttgagactagcctggccaacatggcgaaaccccgtctctactaaaagtaaaaaaatcagctgggcacagtggtaagcacctgtggtcccagctacttgggaggctgaggcaggagaatcgcttcaacctgggaggcggaggttgcagtgagccgagatcacgccactgcgctccagcccaggcgacaaagcaagactccgtctcaaaaaaaaaaaaaaaaaaaaaaaaaagtatttagagcagtgacaagatgttagtcaaactttagaaaacatcactttgaggccaggcatggtggctcacgcctgtaatcccagcagtttgggaggccgaggtgggtggatcacctgaggtcaggagttcaagaccagcctggccaagatggtgaaaccccatcttaactaaaaatacaaaaattagccgcgcgtggtagtgggcgcctgtaatcccagctacatgggaggctgaggcagagaattgcttgaacctgggaggaggaggttgcagtgagccaagattgtaccactgcactccagcctgggcgacagagtgagactacacctcaaaaaaaaaaaaaagaaagaaagaaagtacctgaggtgatgcatgtcttaacttgtgttttttcacaatgtatgcatatatcagcagggatggtgaaatattgaaaaaagaaaacatatatcaaaacatcatgttataacctgaaatgtataccagttttatttgtcagttatatctaattaaaactggtaagggaaaagatgttggaaagttaaaaaaaaaaaaaaagtttaggcataggaaaaagcaaactaccttctcaagtctgtgttcattcacccagactctttctttgttttttgtttttgtttttttgagacagagtctcgctctgtcacccaggttggagttcacccaggttggagttcacccaggttggagttcacccaggttggagttcacccaggttggagtgcagtggcgtcatcttggctcactgcaacctccgcctccctggttcaagccattctcctgcctcagcctcccgaatagctgggattacagacatctaccaccatgcctagctaatttttgtggttagtaaagacagcgtttcaccatgttggccaggctggtctcaaactcttgacctcaggtgatccacccacctcggcctcccaaagtgctggtattacaggcgtgagcctctgcgcccggcccagactcttcctttgtatccatagccagatgactgaactgtctgttttgactttttacaacatactatgtgtgtgtgctaaacaccgggaccccttagctggtgtcccaccatgtgtatgccatcctgctgaccttcactgagcctcagtggggctccagaaagtaacaccccaagaccatttacctggacatggtgatagaaatctgtgtgggataaagatgatgagaatgtgtgtgtttctttttgcagaactatggaaagagaatttagcaaatcaagctgggagggttggctcatgcctgtaatcccagcactttgggaggctgaggtgggcgggtcgcctgaggtgattacaaatgatcctttttttttttttttcaggattaagcatatcttggggcaagtgattttctttgctactgtcagtgtcatttaacacagggaaggacagtatgcccagtgccagtagagcttaatacaacgtgagaaaggatgtttggtcccagttttatttaatacaggaacaagaaactacatttcagttttcagtgtaaactatcacagtacctgccacagagtaatgttcaaatattgttatctttcattattacttctacgaaaattgttagcagggctgggtgtagtggctcccacctgtaatcccagcactttgggaggccaaggtgagaggatggcttgaggctacaagtttaagactatcctggttagcgggcatggtggctcagacctgtaatcccaacactttgggatatactccatttaaaaataaatcaggccgggcacagtggctcaggcctgtaatcccaggactttgggaggccaaggtgagtggatcacccgaggtcaggagttcgagactggcctggccaacttggcgaaactccatctctactaaaaatacaaaaattagccaggtatggtggcgggcatctgtagtcccagctactcaggaggctgaggcagaatgacttgaacccggaaggtggaggttgcagtgagccaagatcgtgccactacactccagcctgggtgacagagcgaccaaactccatctcaaaaaaaaaaaaaaaaaaggactatcctagtaacacagcaagaccccatctcaggccgggcgcggtggctcacgcctgtaatcccagcactttgggaggccgaggtgggcggatcacctgaggtccagagttcgagaccagcctgaccgacatggagaaaccccatctctactaaaaatacaaaattagctgggtgtggtggcgcatgcctggaatcccatctactccggaggctgaggcaggagaatggcttgaacctgggaggcggaggttactgtgagccaagatcgcaccattgcactccagcctgggcaacaagagcaaaactccatctcaaaaaaaaaaaaaaaaaaaaaaagaccccatctctacaaaaggggaggcagaggttgcagtgagtcgagatggcgtcactgcactccagcctgggcgacagagcaagactcatctcaaaaaaataaataaataaaaataaggccaggtgcagaggctcacacctgtaatcctagcactttgggaggctgaggtgggcagatcacctgaggtcaggagttcaagaccagcctggccagcatgatgaaaccctgtctctactaaaaatacaaaaattagccaggtatggtagtgtgtgcctgtaatcccagctacccgggaggctgaggcaggagaatcactggaacctgggaggcagaggctgcagtgcgccgagatcgtgccactgcactccagtctgggcaacagagggtgcaaactccatctcaaaaaaaaaaaagtttttttaatgactaaaagaaagtaaattaccaagagaatttcaggtgggacttagtactgcgaggaaagtaagagtaatgtgataaggagtggctggtagtggggcagggccactgtgagtgttacagaacatgtccccaaggaggtgacagttgtgctgagagatgaaagacaaggggacagccctgcagaggtctgggaaggcactgccccgaggggattgcaggccttggccacgggagtgggcttagacccagcgacctgaagaccaggactctggagcttcatgaaagtggtgggaagaggtcagagaaagggtggagactgatgagactgatggttgtcgggcttggtagaaagcacactaaggggccgggcacagtggctcacacctgtaatcccagcactttgggaggccgaggcgggcggatcacgaggtcaggagatcgagaccatcctggctaacatggtgaaaccccgtctctactaaaaatacaaaaagaaattagccgggtgtggtggcaggtacctgtagtcccagctactggggaggctgaggcaggagaatggcgtgaaccagggaggtggaggttgcagtgagccgagatcgcgccgctccactccagcctaggcaacagagactctgtctcaaaaaaagaaagaaagcacactaaggagcttggatttcatcccacttgccacaggtagccttaaagtacttagagcagccacatgttagtcaaactttaaaaaccatcactttggctgctgtgatcagtacagtgtgtattggatgagcacagaaactggaagtccaggtaaaaggattttgcgctggttaaggcagaagatgattctggcttggaggcagggtcaacagaaagggacagtttaaatgcagagtcagcaggatttgctgatggatcggatgtagttattttagaaaatgcagccaaggatgacaggtttttggcttaagcaatttaccaaggtggaaaaaacagaagaaaaaacatttcgtagagaaaaattgagcttgattttgcacatgttaagtcggaaatgatggaaaagagaaggacccagcaaagatgattaagcagtcactgaggtgggtgaaccaagagagcatagagccttggagtctgggaggagacaatgtgtccgaaggccccaggggcagacacacggtggagggccgctgagaagcaaagtgcaacaggaaggggcaacaggagctgacaatgtagaattcatcggggtgggtggtcaggatggtgaggggacacttgagaaacaggtggagaagaggatgggaatggagcaaggggagacagtggaggtcggtaactctttgaggctagttgtccatagggcagtagccaagcagaattaaggaccagagaatgttttgttgttgttgttttgtgtgtttgtttgagatggagtctcgctctgttgcccaggcaggagtgcagtggcgtgatcttggctcactgcaacctctgcctcctgggttcaagcaattcttctgcctcagcctcccaagtagctgggattacaggtgcacgccaccacacctgggtaatttttgtatttttgacagagacagggtttcaccatgttggccaggctggtctcgaactcctgacctcaagcgatctgcccgccttggcctcccaaagtgctgggattacaggcctgaaccactgcacccggcctgatttgtttttaaatggaggatatcaaagcctatttgcatggtgacagaacagtacagcagagaggaagaaattaattcaagagagaggaaggataattagcagagtccttgatggccacagggccaggattgggatcataaatggaattattgttatttgataggagtcaggaacatatctattaaaacaggagatgaggctgggcacagtggctcacgcctgtaatcccagcactttgggaggctgaggctagcagtttgcttgagcccaggagttcgagaccagcctggacaacacagtgaaaaatccccatctctacaaaaattacagcctgtagtaatgggacctgtagttccagcttctgaggaggctgaggtgggaagatcacttgagtccaggaggcggaggctgcagtgagccaagattgcaccactgtactccagcctgggcaacaaagcgagaacttgtctcaaaaaaaaaaaaaaaagaattatgttggagagtgggaaagccagcaccccacctgggaacatgtggtagcatcaagtcccttgagagattcatggtcatgacataaagtaagatcagttgcttggtggtctggtttgctctggaacatttagctacacataactacgtagacagatcattgggtgtacccagcagtgcattcttctaggtgagtccttccgagggaaagaagcaaaggagtgaagggtagatgactgaccctgggtgtgggtgggaggtgaggacctgtagcagctgctgggtagttaggcagtaggactcagggactggaaagctgtcctaggatgcaggaaaatgccagaggggtggtcagaggaggatgctggaaacggagatttgagaagctggtgaggtcaagggtatgacagtggtggagctggagcggagtcggggatggttagaagagaagaaggccaggggcttagaggctgggatgtaggagggagcatccaaaggggtcgtgcagtttcaagaacgatgatgagaatggaaatggagaggatgttagtgagttagtgctaatttatttgatcaaaatatccagattcttagttgttgaaactgaatgttggcagggtgcagtggctcacacctatagtcctagcacttagggaggccaaggcaggcaaattacttgagcccaggaattcaagaccaccctgggcaacatagcaagactttgtctctataaataattttaaaattacctgggcgtggtgatgtgtgcctgtgcccccagctactcgggaggctaaggcaggaggatcatttgagcctgggaggtcaaggatagagtgagccatgatcatgccactgcactccagcttgggtgacagagcaagatcctgtctcaaaaataaaaataaaaaagttgaatgatggccaggcacggtggctcacgcctgtaatctcagcactttgggagaccaaggcaggaggatcgcttgaggccaggagttcgagaccagcctggccaacatggcaaaaccccgtctctactaaaaatacaaaaattagccaggcatggtggcacatgcctgtagtcccagttactcgggaagatgaggcaagagaattgcttaaacctgggaggtggaggctacagtgagccgagatcacaccactgcactccagcctgggtgacagggtgagactccatctcaaaaaaaaaaaaaaaaaaagaaaaagctgaaagttaacagagaggaatacctgagtcatatggacacaattggtatgaaaggcgggagctgatggctcacattcatgcagggcttttggggacagtaaatggtgacccatccatcatagttaacatacaaatggctctttctgttcacagatgctgctgcagcttcagcaatggtgtcttcatccgccccgtcggtgtacagcgtgcaagccctctctctcctggcagaggtaaatacacacctgacctgtcgtcctttatggaaatgagcgccatcacgaattgttgcaaagacatttgttcattcccaggtgccagtgagcgtgggccgcaccctcccaggtgagctcgtccatcaggcagcattggcctcaagctgcaccatggagttttgggttaggttttgctttaaggactgcacttttttttttgagacagattcttgctctgttgccaggctggagtgcagtggcgcgatctcagctcactgcaacctccacctcccgggttcaagcgattccgctgcctcagcctcctgagtagctgggactacaggtgcgcgccatcacgcccagctagtttttagtattttagtagagacggggtttcactgtgttggccaggatggtctcaatctcctgacctcgtgatccacccaccttggcctcccaaagagctgggattacaggcgtgacccaccgctcccagccataactgcttttcttattgttgctcgcttccaagggtttctgttttctttcttttttttttctttttctttctgttttctttttttgagatggagtctcgctctggagtctgcactcaggctggagtgcagtggcgtgatctcggctcactgcaacctctgcctcctgggttcaagcagttctcctgcctcagcctcctgagtagctgggattacaggacctggctaatttttgtatttttagtagagatggggtttcaccatgttggccagactggtctcaaactcccagcctcaagtgatccgccctcctcagcctcccgaagtgctgggattacaggtgtgagccgtcgcacctggccagtttctgttttcttagggccttgttcttttaggtactggcttccctcctggacatggtttatcgaagtgatgagaaggagaaagctgtgccgttaatctcccgtctgctttactatgtttttccatacttacgcaaccacaggtaacgtcatcttcgccatttcttcccacccatatgcagaaaaatatgttttcacaaatgaatcaagtagttttccttggacagtccttgaccttgacccttctctcttcccactcccactcagtgcctacaatgctcccagcttccgggctggcgctcagctgctgagctccctgagtggctatgcctacacaaagcgagcctggaggaaggaggtcctggagctgtttctcgaccccgctttctttcagatggatacttcctgtgttcagtaagatatgctgtcctgataacaacgtgctctgaatcttcaggtggaaatggcattttggtttacagaattctcattcctgaaatagaagcagagccataggatcaacccaaataacaggacgtccctgtcacaggctcgcatgttgaccatgtgttcatgggaaagggatcaagtcttttaaagtacaaagaggaatatcacttaattcagagagcatgttatttcctggctgggcacggtggctcatgcctgtaatcccagcattttgggaggctaaggtgggtggatcacctgagcccaggagttcgagaccagcctggccaacatggcgaaaccccgtctctacaaaaaaattcaaaaattagccgggcatggcagcgcacacctgtagttccagctactcgggaggctgaggtatgagaatcgcttgaacctgggaagtgaagcttgcagtgagtcaagatcccaccactgcactccagcctgggcaacaagagtgaaactctgtctcaaataaataaacagcagaacttggggttccagtgatacttgttctatctaatactgctttgtcttgtaatcacaaaataattggccagtgttaagatgacagagcccactgggtgaccctgggggtgtctttaccccacttctcggctgatactccacaagttcttactgagatcttgcagcagccaagcagagatccactgagactcagatgcaagatgtgctcctgggccttttcctgagataaagaaaatcactcagggctggtcatggtggctcacacctgtaatccaacattttgggaggcttaggcaggaggattgcttgagcccaggagttggagaccagcctgggcaacaaagtgaaaccccatctctacaaaaaaaaaaaatcaaaaaaattagccaggcatgcgggcatatgcctgtggtcccagctacatggaagcctgaggcaggaggatcgcttgagcccaggaggttgaggctgcagtgagctgtgattgtgccactgcactccagcctgggtgacagcacacgaccctgggccctgtctcaaaataaccagaaagaaagaaagaaagccactcctttattaatgacaggaaggcttagcgatagagggtagagattgggaaccctttttgtatggcatgaaagcatggccacccccagagggctgctggtggccctgtggcctccctccacgtgatcttgttgctctgctggggtagctcatttggaaagaaaagctaagggtggtatttgtcttcactatcccactcttttcatcaacacaactgtgtgaatatcatcctgtatgaacatatttaagaataacccttgaaaaagccagagtgccttgtcagtttgtttctttgtggtaaactggaaaaagtcatcattcattccctatgttagggttataaatgaaaagctttttcgtagctttcttttatatgtaaactatttatttctatcactaacctcttttcagaaagcagtttttttgtttgtttgtttttgagatggagttttgctcttgttgcccaggctagagtgctatggcacaatctcagctcaccacaacctccacctcccgggttcaagcgattctcctgcctcagcctcctgagtagctgggattacaggcatgcgccaccacgccctgctaattttgtatttttagtagagacagggtttctccatgttgctcaggctggtcttgaactcccaacctcaggtgatccgcccacctcggcctcccaaagtgctgggattataggcgtgagccactgcacctggcccagaaagcagtttttaatatatcttaagaggatatgttattttcttaatgttttgaatcaaactatcatccactgcaaatttaattgattttgctttctttaatatccagttggaagtccattattgaccatcttttgactcatgagaaaacaatgtttaaggatttaatgagtaagttctgtgttacttttgcataactcacacttgataggatcaatgccaatataaccagctttcatcatgtatttccgaaccctactcacactttcatggtgctgtctacgccacaaagactgtaatgtgatgttcataatatggcaggactaaatcaatgagtcttttccagttgcaatttattgacaagaacgccacgacaacctttttcatagttttatagtggagaaatactgccgaaagcatccagcttcacatcttgacatttgtgctgaaagtaataagtttctataatttactaggaggacttttctacacctcagatcccttctcatgcactatcattaagtatcattaaagaaataagtattgggctgggcacggtggctcacgcctgtaatcccagcactttgggaggctgagatgggcggatcacagggtcaggagatcgagaccatcctggctaacacggtgaaaccccgtctctactaaaaatacaaaaaatagccaggcatagtggcgggcgcctgtagtcccagctactcgggaggctgaggcaggagaatggcatgaacccgggaggcagagattacagtgagccaagatcgtgccactgcactccagcctgggcgacagagcgaaaatccttctcaaaaaaataaaaaaataagtattggctgggcacagtggctcacgccaatcccagcactttgagtggctgaggtgggtggatcatttgagcccaggggttcaagaccagcctgggcaacatagcgaaaccccatctctacaaaaaattaaccaggcactgtggcacgcacctgtagtcccagctacttgggagactgaggcaggaggatcgcttgaacccaggaggtcgaggccgcagtgagctgtgatcccaccactgcactccaggctgggtgatagaatgagatcctgtctcaaataagaaataaaaagagaaataactattttttaaatatacatgggaacagtaatctcatgtccttacttaataaagatcatgatttttcaccagggaatatagaattacactagtatgaatttcccatcacttccctccaattgtggttttctcactaagtaaaacattgctgtatttattctagacatgcagagcagttctttgaaactattctcaagttttgaacagaaagccatgctgttaaagcgccaggcttttgctgtcttcagtggagaacttgatcaataccacctttaccttccactgatacaaggtaagacagctgtcttagtctgttttttgctgctataacagaatacctgagactggggaatttataaaaacagaaatttattgcctcacagttctggaggctgagaagtcctatatccagggctggcgtctggcaagggccttcttgctgcaacatcctatggcagaaggtggaaaggcaaaagagcaagagggggctgaacctgcccttttattacagtaccaatcccatccatgatgtggcctaatcacctcttaaaggccccacttcccgataacattacatttacaataaaatttgagcatgcattttggacaggacaaacattcaaaccacagcaacagctgacctgccctcactgcccccacacacagatagacccatgaggggctgagatgattaagtactagaggggtctactgcgtgctttggcatgattgtcacttgttaaaacaagtattctgcagagttatagaacttcagaagtatattggtaaatctgaaactttattttaaaatcaattataggtcaggtacagtggctcatgcctgtaatcccagcactttgggaggcccaggtgggtggatgacttgagatcaggagttcaagaccagcctgaccaacgtggtgaaaccccatctctactaaaaatacaaaattagccaggcgtgatggtgcgcacctgtaatcccagctacttgaggctgaggcaggagtatcacttaaacccaggaggccaaggttgcagtaagccaagatcacaccactgcactccagcctgggcaacaagagcgaaactctgtctctaaataaatacataataaaatcaattacagtgttattaatttgtattagtttttaaaagtctgaccacagtataggaataatacttcctcagcactgtctcttgctagagtcctcctgcagtcaaggtactcggtgtttacagtactcccttaatcagcaccttcagctgaggccagggaaggggcaagattttggagaaggatctaatttttccttaacaatttttttttcatccccactacattctttgactgcatcaaaaataattattgctgactgggcacggtggctcacgcctgtaatcccagcactttcagaggccaaggcgggtggatctcttgaggtcaggagtttgacatcagcctgcccaatgtggtaaaaccccatctctactaaaaatacaaaaataagcctggtgtggtgactcatgcctataatcccagctactggggaggcagaagcaggagaatcgcttgaacctggtaggcactgagccgagattgtgccactgcactccagcctgggtgacagagagagactccattgcaaaaataaataaataaattgttattattattgccaacatcgtacgtgattgtcagggtttttttttttttttccttctcataaaatgttcaggtggcaaagttgacattctgttttgtttttgttttcattttgagccagggtctccctctgtcacccaggctggagtgcagtggcgcagtctcgcctcattgaaacctccgcctcctaggttcaagtgattctcctgcctcagcctccaagtagctgggattacaggcacccaccaccatgtccggctaatttttgaatttttttagtagagacagggtttcaccatgttggccaggctggtcgcgaactcctgacctcaggtgatctgcccaccttggcctcccaaagtgcttggattacaggcatgagccaccgcacccagccggaaagatcttgttttagttcaaagcattaacagcgttgactcgttagtcatgataacttacatatgcaataataaaacacctttacactttaactgacataatttccgcatgtagtgcacataagatttttaccttgtaatatcttgaacacttaagaaacatgaaagaaaactttcaaatattaacaagtccagttggcgtgccttgcttgaataactgtgataggaggatgatttaatcagacggtaaccaggagcaccagtaaaggtaatgtcagctctccaaagactgtggctaaatgcaaggtcagagctgaactttgttgcctccctacaaaatctggagagaaaaagaacaacaggaatcaccttttctttagttcatgtgcagtataggggaggattctttatgaacccaaccactagacagtggccctaagggaagcagtaagcctactttctcagtggaggaaaatgaaaaggagagcatattgggcaatgtacctgataaccctttcagtgccttttcagtctaagagcagacacctgttccttttttttttttttttttttttttcctttgagatggagtcttgctctgtcacccaggctggagtacagtggcacaatctcggctcactgcaacctccacctcccaggttcaagcaattctcctgcctcagcctccaaagtagctgagattacaggcaccagccaccacactcagctaatttttttgtacttttagtagagatggggtttcgccatgttgaccaggctgatttcaaactcctgacctcaagtgatccgcctgtgttggcctcccaaagtgctgggattacaggcatgagccaccgtggccaaccacctgttccttctttctttttttttttttttttttttttgagacggagtctcgctctgtcgcccaggctggagtgcagtggtgcaatctctgctcactgcaatctctgcctcccgggttcaagcaattctcctgcctcagcctcctgagtagctgagattacaggcacacaacaccacgcccagctaatttttgtatttttagtagagacagggtttcaccatgttggtcatgctggtctcaaactcctgaccccgtgatccacctgcctcggcctcccaaagtgctgggattacaggcatgagccactgcgcccagccctgttccttctttctaccccatctcacactcctctcaaatttgggaggaagcccagatagctaaatagacagcattaggtgtatagaagctagaaccaaaaaaacaaaaagatagacaacattctgaaacaggggtgtggagaatttgaccatggtagagtttaaacacccagcaattctgagaaattatttctctgagagggagcaagcacaggcaatataatagaatatatatataaaaaacatgttttacataatatattaatatgttatataattatatgacattgtaacatgtaattattatatttgtattatattgacatgattgtaataactaataggtaatgattatataaatagtaatattaaatattatactatataacaatatacttgtttatattatatattcaaatatgcaataaaggcagcagaatgctaactgaaaatggaggtaggttttgggctcttgggaaaagagaaatttttttgttgttgttgggaggggaacggagtctcactctgttgcccaggctggagtgcagtggcacaatcttggctcactgcaacctccgcctcctaggttcaagtgattctcctgcctcagcctctcaagtagctgggattacaggcacccaccaccatgcctggcttatttttgtatttttagtagagatagggtttcaccatgttggccaggctggtctcgaactcctgacctcaagtgatccacccgcctcagcctcccaaagtgctgggattacaggcatgagccaccatgtctggccgggaaaaagaatttctaaataaatacgcttcgttttggatagctcaagtgctatatttctaaaaatactacgtgtttttaaaaaataagccttttgccctgttttcatttttgatgaactgacagtttacagagcactttcctacatgttgtcgttgtccccaggatgctcgtggataggcccagcccccctgagtcctgggttgatggcactcagagtgtcctctgccagagctgtgggacactgaacttgcctggagatgccctgtggagggatgatgcccacatctgcctcagagaggtagatgcatccagaagctcccaagaagtgtcccatagtaaatagtttgggcccaattaaaagaggcaggaggctgggcacagtggcctgtaatcccagcaccttgggaggctgtggtgggcaggtcacttgaggtcaggagttcaagaccaacctggccaacatggtgaaaccccacctctactaaaaatacaaaaagttagctgagcatggtttcaggcgcctataatcccagctacttgggaggctgaggcaggagaattgcttgaaccctggaggcggaggttgcaatgagccgagatcgcgccactgcactccagcctgggtgacagagtgagtgagactccatctcaaaaaaaaaaaagagacaggagtggagaatttctaacacttctctcctgggataccgtttggggtccttttccccggacactgttgcaccatcgagtagcagagaaggagatggggagctgagcagctctgtatgtctcggctcagagtgacatcagtcttacgtctttgggggctgggaagatgtaggtgaaaggatacgaaggtgcaattatggaggatgagtaagtctagaaaaggcatgtacaacatgaggactgtcgttaataacactgcatatgtactgggaatttgccaagagagtagattttaggtgctcttaccacaaaaaagaaaggtcaaagacaggcgcggtggctcatgcctgtaatcccagcactttgagaagccaaggagggcagatcacgtgaggtcaggagttcaagaccagcatggccaacatggtgaaaccccatatctactaaaaataccaaaaattagctgggtgtggtggtgggtgcctataatcccagctactcgggaagctgaggcatgagaatcatttgaacccaggaggcagaggctgcagtgagccgagatcgcaccactgtactccagcctgagtgacagagtaagactccatctcaaaaacacacacacacacacacacacacacacacacacaaaactgactgagcatggcagctcacgcctgtaatcccagcactttgggagtccaaggcaggtggatcatctgaggtcaggagttaaaagatcagcctggccaacatggctaaaccctatctctactaaaaatacaaaaaattagccgggcatggtggcagacacctgtaatcccaactactctggaggctgaggcaggagaattgcttgaacccgggaggcggaggttgtagtgagcggagactgctctgctgccctctagcctgggcaacagagtgagactccatctcaaaaaaaaaaaaaatttattactaatatactaatgtactaatgtactacagccgatcttagctagcatgactaccattcagctgtttgctgtagcaatttgttacattcctaggaaaccttaagctatggaagaaaaaaaaagtctcattctacaaacaagacatttcaggggagaagcaggggagagtgttaggggctagagagtgttatttgaaacacttttccctccataggaatgaaagtttttgtcatggccatcaagtttaaaccttactcagtaaatctgttatatttacttgctccgcttcccacccaccaccctcaaaatatggtgttgtctgccagccagtccatatgattgtgtaagtccattcctcaccatgggctgcttggtttctgcgtctcctcattcatattcttaaaagaacattgaaatggctgttggtcatccagtggatttctggtgacagatgttcatgtctttctactcagctgtggcagggggacggcctgtgggaatcatttccttaggtttggcaagagccatgaactgctgtatttcacaaagaagagggctggggtggactagttgcacaaaagcatctcctaacattctttttttttttttttttttttttttgagatggagtctcactctgtcacccaggctggagtgcagtggtgtgatctcggcccactgcaacctctacctcccaggttcaagcgattctcctgcctcagcctcccaagtagctgggactacaggcgcccaccaccacgcccgactaatttttgtatttttagtagagatggggttttaccatattggccaggctggcctcgaactccttatcttgttatccgcccgcctcggcctcccaaagtgctgggattacaagtgcgagccaccaagcctggcctgtaacactcattccttacactgggttgttactagaatgtcagaacagtcacagttttatttttctttgtctgataagaaaccctaaactgcatatttgtgtaacatctttacaatcttctttccttagaacgcctgacagacaatctcagagttggacagacatccatagttgctgctcagatgtttctttttttcagagttttgctgctaagaatatctcctcaacatttgacttcattgtggccaataatggtctctgaattggtgagtacaagtattgtaagtttgaaagcaaggttggagctttttaaaatgctttttcagtaacataacgtactatttcctatgtatcccattttatctaaatgttatttttaatcaggttggtagcacatggttagctcttggttaaacagagaatattttactctatgatcatatttgatctctcaccctgtcagttattccaactaacttgtaccatttgataatacttactagttttttatatacatataaatttgggctgggcgtggtagcttatgcctgtaatcccagcacttcgggaggctaaggtggatggatcacttgagcccaggagttcgagactagcctgggcaacatggtgaaactccttgtctacaaaaaaatacaaaaattaattcggcatggcgggaagttgcatctgcagaaggttgaggctgcagtgagccatgattgtaccactgcactccagactgggtgacagagtaagaccccgtcttattcattcattcataaattaatcgatttttaaaaataagtaaaaaaaaatatttgggtagatttaatctgtctcagatagtaacttgaatgcatttttttttcagattcagacattcacacagcttgaagaagatctaaaagatgaagatgagtcattgaggtaagcagtacaagatctgtacacaagaggaaaagatagtcacgattaaagcacgtcactttagatatagagttgtctaatgttaaatgctgttatcttgaagtacttgtgaaaggaccagctattccaaaaatttcttaaaaagaaaattcttctgagggacaggtcataggtgaatggactataacagatctgaatgaatttataacaagcgtttctttgcaaatttatagaagcaccaacaaagtaaacagaacgaaagtttcagtcccggatgcaaatggaccctcagtgggggagataccccagagtgaactcatcttgtatttatcagcttgcaaattcttggacacagcgctttcttttccacctgacaagatgccattatttcaaatgtaagtcagataggatcgtgtgtcctttttgaagtaagagattttgttttttccttttaagcactttcacttgtttttcatgtacagtttatgggaaaccaccatctgggtttctagtgacagctaagccagctcggaataccaagtttcagattacttgcaacatctgtggctctgcaaatttggctcacaggagtgtttatgaatgtgtttctatggtgtgtgtgtgtgtgtgtgtgtgtgtgtgtgtgtgtgtgtgtgtgtgtgtggtttttgctactgaatgcttataaaacagggcttacccactggtgctcctcactgcctttgtgtagacctttttgtctgtgtttagttagatacaaatgcctttatttggagcctgccatctccgattcactttgccccataggcttatgtttcctgccggcttagcacagctgctcatttgtttaatttcatgaccagccccagaggctatttctctctctcctacccccacaaagagagtaatcatatagaaatgtttgtggttaaagagcgggttctcttaaatgcacattgctaagtgaaagaagccagtctgaaaaggctacacactgtatgattccaaccatgtgacattctggaaaaggcaaaaccatggagacagtaaaaagatcagtggtcgccaggggttggggagagggaggcagggatgaatgggtgaagcacagaggatttttagggcagtgaaattattgcatacagagctataatggtagatccatgtcattgtccatttctccaaatccatacaatgtacaccaccaagagtgaaccctgatgtaaactctggacttgggaggataacagtgagtcagtagaggctcttcagttttaacaaatgtaccactctggtgcaggatgttgataatacggcaggcttgtatgtatgtaggatgggatgtacgggaactactttctactccattttgctgtgaacctaaagctgttctgcaaaagaaagtcttttagtttttaaaaagcaggtttgggccggacgtggtgtctcatacgtgtaatactagcactttaggaggctgaggcgggtggatcacctgaggttgggagttcgagaccagcctggccaacatggcgaaaccctgtctcaactaaaaacacaaaaattaggccaggtaccgtggctcacacctgtaatcccagcactttgggaggccaaggtgggtggatcacttgaggccaggagttcaagaccagcccggccaacatggtgaaaaaccctgtctctactaaaaatacaaaaattaggccaggcgcgatggctcacacctgtaatcccagcactttgggaggccaaggtggttggatcacctgagtttgggatcagcctgaccaacatggagaaaatccatctctactaaaaatacaaaattagctgggcatggtggcgtatgcctgtaatcccagctacttgggaggctgaggcaggagaatcgcttgaacctgggaggcagaggttgcagtgagccaagatcatgccatctgccattgcactccagcctgggcaacaaaagcgagactccatctcaaaaaaaaaaaaaaatacaaaaattagccagatgtggtggtgggcgcctgtaatcccagctacttcggaagctgaggaaggagaatcacttgaacccgagaggcagaggttgcagtgagccgacatcgcaccactgcactccagcctaggcaacagagcgagactccccctcaaaaaaaaaagaggccgggcacagtggctcatgtctgtaaccccagcactttgggaggccgaggcaggcggatcatgaggtcaggagttcaagaccagccaggccaacatggtgaaaccctgtctctactaaaaatgcaaaaattagctgcctgtattggtgggcacctgtaatcccagctactcaagaggctgaggcaggagaatcgcttgaaaccgaaggcggaggttgcagtgaaccgagatcgcaccactgcactccagcctgggcgaaagagcgaaactgcatctcaaaccaaaaaaaagtggaggctaggcgcagtggctcatgcctgtaatcccagcactttaggaggctgaggcaggtggatcacgaggtcaggagttcaagaccagcctggccaagatggtgaaaccccgtctctactaaaaatacaaaaaaattagtcaggcatggtggcaggtgcctgtaatcccagctactcgggaggctgaggcagagaattgcttgaacctgggaggtggaggttgcagggagccaagattgcaccactgccctccagactgggcgacagaacgagactgtctcaaaaaaacaaaaaagtgggttccgatatatgtgaatgtgcatagcaacattatttataataggcaagaagtagagacaacccaaatggccatcagctgatgaacaggcagatcatgtgacatatccatacagtggaatacggttcagcaacaaaaagaattgaagaactgagacacgctggaatctggatgaaccggaaaatatgatgctaagtgaaagctcgaaacaagggaacatatagtgtatgattctgcttatatggaatgtccacgatgagacagagtgtggattagtgggtgcctaggtctcaagggtatagggggttggggtggtgatggctgagcagggcaggatttctttttggggtaatgaaatactctaaaattgattgtgataatagacgtgcaactctatgaatataataaaaggcattgagttgtccatattaaatagatacagtatgtgaattatatcttaataaaactaattttaacgacgttgaaggcctcttaccagcagacctgaccttctgtttgttccctgcagttataggtgggcatttattccagaagtggacacagagggccctgccttcctgtcggatgtagaggagaatcaccaagaatgcaaaccccacactgtcaggattctagaacttctaaaattaaagtttggggtaagtgcttttcttttcttttctttttttttttttttggtgagacagagtttcactcggccacccaggttagagtgcagtggtgcggtcttcgcttactgcagcctccacctcccaggttcaagtgattctcctgcctcagcttccggagtagctgggattacaggaatgtgccaccacacctggctaattttgttttgttttgttctgagacggaatctcactctgttgcccaggctagagtgcagtggcacaacctcaggtcactgcaacctcagcctcctggtttcaagcaattctcctctcagcctctggaatagctggaactacaggcgcacgccaccatgcctggctaatttttgtttttttgtttttgggttttttttttttttttttgagacgaagtctcactctgttgcccagactggagtgcaatggcaggatctcagctcactgcaacctccacctcccaggttcaagcaattcccgcacctcagcttcccaagtagttggaactacaggcacatgccaccactcttggggctaatttttgtatttttagtagagacaggttttcgccatattggtcaggctggtctcgaactcctgacctcaggtgatccgcctgcttcagcctcccaaagtgttgggattacaggcgagagccaccgtgtccagcctgcttttctttttaaaaattatattcatgaggctggtaatcccagcattttgggaggccgaggtgggcagatcgcctgaggtcaggagttcaagaccaacctggcaaatatggtgaaactccatctctacaaaaatacaaaaattagctggtcatggtgaccggtacctgtaatcccagctactcaggaagctgaggcaagagaatcgcttgaacccgggagacagaggttgcagtgagccaagatcacgctgctgcactccagcctgggcgacagagcaagactctgtctcaaaaaaaaaaaaaaaggaccttatttcttaggttttgccacatgcatgtgcttcccagccatctcgagccctcagtaaaaccatatcattgttatgggtttgttttttctgcaggaaatcagtagctctgatgagatcaccatgaagagtgaattcccgcttctgcgccaacattctgtttccagcatcaggcagttgatgccattcttcatgactctaaatggtgcatttaagacccagagacagctgcctgctgatagcccaggaactccattcttggactttcctgtcacagatagcccaaggatcttaaaacaactggaagaatgcatcgaatatgattttctggaacatccagaatgttaaccatgtgagagagaatatgtttaatccatgtattggtactttactgaaaaccaggttatattctaaagaagaaagaaggcaggatagtgcttttgaacaagcctatttccattttgaaagtagatttcaggctaggtgcggtggctcacacctgtaatctcagcactttgggaggccaaggcaggcagatcacttgaggtcaggagttcgagaccagcctgaccaacatggtgagaccctgtctctactaaaaatacaaaaattagctgggtgtggtggcggcgcctgtaatcccagctacttgggaggctaaggcatgagaattgcttgaacccaggaggtggaggctgcagtgagccgagatcacgacactgcactccagctgtgtgacagaatgagaccatctccaaaaaaaaaaaaaagtagatttcagataatttactgttcagcaacaggacacacctccctaaatgccttgtaatatatttgaatctgattctgcatttcttcctcaatttatgtaatgaaaataaaattaatatatcatctaacagtagcacaaaatttgtaatatgaagtaaagtatgaagataatgaagaagttgttttctttgttgaagcagttatatgggtctttctcagtatatttctcttttctctaaaagtttaaacttattaaaagaatgttatttttaacctttcacacaaatgtcctttaaagtgcttattttggtactccattttaaaacgaaaatacattgttttctgaggacaataattgccccttacccattcagcagaggtaaggtaacctcaatgtattcaaagataacctcaatgtattcaaacctcgcacattaaaaattacatgtttgccgggcgcggtggctcacgcctgtaatcccagcactttgggaggccgaggtgggcagatcacctgaggtcaggagttcaagaccagcctgaccaacatggagaaaccctgtctctactaaaaatacaaaattagctgggcatagtggtgcatgcctgtaatcccagctactcgggaggctgaggccggagaatctcttgaaccggggaggcggaggttgccatgagccaagatcgtgccattgcactccagcctgggcaacaagagtgaaactccgtctcaaaaaaaaaaaaaaattcatgtttgcacagtttaacaacataagtacagggttttaaatttctgacagcacgttcttttcttttcttttttttcttttttccccctaaacgtttaaaatatatttctaaacagaatgggccaattcagtcacagtaactgttgatctccatagcagagcaacccacaaagacagaactgatttttttcccataatcaggggtgaaaaatatacaacttgtttctgaaccaaaaccacaatttctgcagtttaaaatgtttcactgctaatatggccctggtagaaattatgtagtttcttttcttctttaaaaaaaaaaaaaattaaaaaaatttcctaagacactaaatgctccatctggaatgtagattctgatcacaaagcagctcagttaacctaaaaaataaaaaattcccatcacctgtctcagtagggcctgagagtagtgtggggaaccccagctttggtatggagagtcatggccccttgaaccagatagagaccttgaatagccatagctggtgcttctctcaggataaactctgatgtaggaagtatcaccctcatgagagtggaatttggtcatccagttgacgcagggcatattccatgtcttcttttctgagacacccaaccatccccactccatccttctgcacatccgtgtaacaggcatccccagcttctcgcgtgtgatccttcaggtcctgccagctgcctgatggaagaagtccatttcttccataaatagcatcctctgcatctcgagggtcctcgaagcgcacggaggcgaagggcacaaggccgtaccggctcttgagctcgatctcgcggatgcggctgtacttgtagaacaggtcctgcggctccttctcgcgcacgtgggtcggaaggtttccccacgtagatgcacccgtcgccctcccagccgcgctcgtgtccgcccagccggacaaccgcaccgcccgacgctgctggccagccgcagcccgcatccgcccgtatcgccgccgctgccgcctcagcacggctgcccccgcagcgtctgttttgttttattctaacagggtctctctctgtcgcccaggctggagtgcagtggcgtgatcttggctccctgcaacctctgcctcccgggttcaagcgattcacctgcctcagcctcccaagtagtgggcattataggtgccagctaaccatggccggctaatttttttttttttttttttttttttttgagacagagtcttgctctgtcacccaggctggagtgcagtggcgcgatctcggctccctgcaacctccgcctcctgggttcaagcgattctcctgcctcagcctcctgagtagctgggattacagctatgtacagcgatgtctgcaaagatagggatttaacagcactcatatcttcatgttcataaaaaagtcctacacgcgtgatgtacgtctagatctttccttttgtcacaggatatagcacggtagttacggatatagtctccgcagtgcctgggtttgactcagcttccccacgtactgtcctgcgcatattttgtgtctcagtttcctcatctttaaggtaggaatatcaatggtaactacctcttacggtggtagcaactaaccagctctgccacttctgtgatctctaagcagttttgatcatacacccagcagtaaaaattaagtatctctccagccccaatatctataagctgtgtgttacattaatttacttgggttccaacatgtgtattttataaaacagaggatggggattttaaaagtatgaggactggggccgggcgtggtggctcatgcctgtattcccagcactttgggaggccaaggcgggcagatcacgaggtcaagctatggagaccatcctggccaacatggtgaaacctcgtccccactaaaaaaacaagaattatctgggcgtggtggcacgtgcctgtagtcccagctactcagaaggctgaggcaggagaatcacttgaacccgggagatggaggttgcagtgagcagagatcacaccactgcactcctgcctggcaacagggcaagattccatctcaaaaaaaaataaataaataaagtatgaggacaggccagtcgtggtggctcatgcctgtaattctagctttgggaggccagggcaggaggattactggagtccaagagtttgagaccagcctgggcaacatggcgaaaccctgtctctataaaaataccaaaaaaattagccaggtgtggtggtgcaagcctgtagtctcagccacttgggaagctaaggcaggtggattgactgagccccgaaggcagagattgcactgagccgtgatcaccccactgcactccagcctgggtgacagagtgaggctctatctccaaaaaaagaaaaaaaaaatgaggtcaaacaaaattaccagtttgttctttttagattttagagttagagtcttgctgtgttgcccgggctggagtggactggcatgatcatagctcactgcagcctcgaactcctgggctcaaagcaatcctcctgcctcagcctcctgagtagctggggctacgggtgcacactaccatgcccagccaactttttgattgtttgtagaggtggggtgtattagtccattttcacactgcgataaagaactacctgagcatgggtaatttataaagaaaaggtttaatcgactcacagttctccatggctggggaagccacaggaaacttacaattatggcagaaggcaaaggggaagcaaggcacatcttacatggtggcaggagacagagtgaaggggggaattgtcacacactttaaaccatgagatctcatgagaactcaccatcatgagaacagcatggggaaaaccgcccccatgattcaatcacctcccaccagcaacacgtggggattacaattctatatgagatttggatggggacacagagccaacccatatcacaggagtctcactatgttgtccaggtcagtctcctgggctcaggcgatcctcctgccttggcatcccaaattgctgaggttacaggtgtgagccaccacagatggcctgatatttttttcttagcccccaacaatgagcttctgcaccctctttggagacaactgctataactcagtttgtcccagaagtaggccatatgtggccctaggaccaaagggtcgctacaccaagggcaggcagtgttttggaagggctggtgtttgccaagggtggctgtggcaaacaatgagaacagactgggaattctcacagagcagagagttgaacacacggatcttcagggagtgccggtgtgggtgtagcccctgtgtatgtgggcaagaaatgagccctaccgcagcagccagggtggtgctcaggacttcatgtgcgtgattttcttaccacccctcagaaagtaaggacccttagcccattctacaaagccagcagaactgaggctcagagaagcagggtgaagaatcgaaacctaggtctctcaccagcgctctatgttgtcaaccacagtgctgagaaagttaaacaggaaccagatagccggggctgtctagtcatgtgcagaagagacagtttctgagactgccccacccagttatgacttcctgctaaaccagctcctgccagggccacagcagaggagatgggagatcatacacagagaggaggttccccgcttacaaggcgtgatgaagtgtgttttaaaggagagcaagccttactttccagtatttgcacacaatgctcagttgaaaatcagtagaagtagctggaatcatggagatcattgatgaagactgtaaagttttgaacaactgtcttggggagcagacagtcttctgtgctatttggtcttaaatgctctgaggtaaaagaatgcagctgtcggccgggcatggtggctcacgcctgtaatcctagcattttgggaggctgaggcaggaggatcacaaggtcaggagttccagaccagcctggccaatatggcgaaaccccgtcgcaactaaaattagccaggcgtggtggtgggtgcctaaaatcccagctattcaggaggctgaggcgggagaattgcttgaacctgggaggcggaggttgcagtgagccgagattgcaccactgcactccagcctgggcaacagagcaagactccatctcaaaaaaaaaaaaaagttacaatagtaaatagtaaaattttatgtatattttaccacagtgaaaaaatttaaaaacaaaacactatgggctgaaagtgggggctggggagacaagtgtgattgttctgcagctggagagagccggggctcccccttctctgatgagcaagcacctgtcccatcctcagaggtgtttagaagcagatgagaggtagcaaattaagcagaagcttgcccttcaatgttttggctatagaaatggaagtcacttgacattttaccctaaactgatgttataataatgacttttaggaacagatggccctttctttctagcctccttcctggcggccacttatccatctcttctgcctcctccaaccactcagcgttatcatctcttgcatttcataacatatgccattccatctgcttgatattattttatcctcctcctccacctggcagagtcctagttaagtcattttttggtttatttaacaaatatgtgggaaccaggctgagttctggttttgaggagcttcttgctctctttctgtacttcctcaggtacagggagggactctgccatagggtggccctatgattaacatagttgcccattgctggctgagaggtaggagctgttttatgaaacaaacagggtccatatcttcggttcctagcggtgtctggcatatataggtgcccggtacgtgactaaacgaacatgaaggttgatgtatctgcccaaggcggtgctagaaggaagaggggaaggtactaaaccaaatgtttaatcaattaatttgtaggactagacaggtgggggctcagagaacagtgggttttctgccccaaacttggacctttcatcatcttaataatcatctccccgaggcagatgctatttcactgatcacccaccttttgctcaggaggatgttcttcctggtatgcttttttttttttttttttttttgagacagggtctcgctgtgttgcccaggctggagtgcagtggcacgatcttggctcactgcgatctccatctcccggattccagtgattcttgtgcctcagcctcctgagtagctgggactacaggcatacaccagcacgcccggctaaattttgtattttcagcagagatggggtttcaccatgttgcccaggctgatctcaaactcctgactcaagtgatgtacccacctcggcctctcaaagtgctgggattacaggcgtgagccgccacgactggctctctctttttttttttttcttttgagacaaggtctcactttggctttgttgcccaggctgaagtgcagtggcgtgatcatggcccactgcagcctcgacctcccaggttcagcctcctgtgtaactgggaccacaggtgtgtgccaccatgcccagctaatgttttttatttttattttattttattttatttttgagatggagtctggctctgttgcccaggttggagtgcagtggctcaatcttggctcactgcaacctctgcctctgggttcaacaattctcctgcctcagcccccagagtagctggggttacaggcatccaccaccacaaccagctaatttttgtatttttagtagagacaagatttcaccatattgttcaggctggtctcaaattcctgacctcaggtgatctgcccacctcggcctcccaaagtgctgggattacaggcatgagccactgcacctggcctgttttttattttttgaagagactggatctccctatgttgaccaggctggtctcaaattcctgggctcaagcaaacctcccacctcagactcctaaagtgctgggattacaggtgtgagccaccacacccagccccctgacatgctttttacctcttccctgctggttccaggactacccagcttcagtccaacccccctaaagcatctctgtgaagaccacccatgccgtcttcactaggcttgtccataattctcgccggaccctttgacaaccaaacaggactcggtgcacagctgtacttcttgcagctctttgtgttatatgaatggtactgtgttaactaaggactcaattgaatagtgttccacgtttctcctcctattatgttttgtttgtttccgtcttatccaagataacaatctaaatttcatgcccggatatggtggctcacgcctgtaatccctatactttgggagagatcacttgaggtcaggagttcgagaccagcctggcctacgtggtgaaaccctgtctctacaaaaagtacaaaaattagccagatgtggtggtgtgtgcctgtaatcctagctacttgggaggatgaggcaggaaaatcgcttgaacccagcggggcagaggctgcaataagcctaggtcacactactgcactccagcctgggtgacaaagcgagactctgtctcaaaaataaataaataaataaataaaataaattgtgtcaggaaacagacaagttgtttaatgttttgggaggggtagctcttgtggccagctgaagacgatgattggcctaatactatttgaaatgcttgttccctggtgccataaagaaatagcacttgaacatacatttaatttactcagcaaggccatttttacttcctgcagaaaaggtacactcgccagcagttttgccatgagagtacaccaaacaaaggagacagggtcatttatactgctgtgtccggtttccattggctggaacgggacctcacattctgtatttgtcccgattggctaacaacttagaactttttaaaagaggcaaaaggtggaggagaacaaaggaaggaggaaggccgggtgcagtggctcacacctgtaatccctgcactttgggaggccgaggcgggcatatcacgaggtcaggagatcgagaccatcctggctaacatggtgaaaccccgtctctactcaaaatacaaaaaaaattagccgggcatggtggcaggcacctgtaatcccagctacttgggaggctgaggcaggagaatgatgtgaacctgggaggcagagcttgcagtgagctgagatcgcgccactgcactccagcctgggcaacagtgcaagaaaagaaatgaggaagtaatttgtggaatgctgagaaaggtaaaaacaccttcaaataaggaagaggaacaggctatgacctaatgcttgcttggaccagtataagcatgccagggcaaatatttaggctaaattgtgggagctaagaacttaaagtacattgattatcatggctagcagatatttaagaatgttagcacaggtctttgaataaattttgcttctaagagaagttactatttattcctaattaaatggggaggaaagtctttgaagaggaacctctactttactttttacaatatgtacatatgaagctaggcaggcaccatgacacacctgtagtcccacttactcaggaggctgaaacaggaagatgattgagaccaggagtttgagacaaaccttggcaacgtagcaagaccacatctgtacaaaaagtcagaaaatcagctgggcatggctgcacaaacctatagtcccagctactcaggaggctgaggcagaaagataacttgagcccaggagttcaaggctgaggtgacttatgatcgagccattgcactctagcctgggcaacagagtaagaccctgtctcaaaaagaaaaaaaaaaatctgcataatcaatatcaccagcaaggtaaaagataaatggcaaactgagaaaaatatttcagactcctgtcacaaagtgcttatttctccaatacttgaagaatgcctaccaaaaaaaaaaaaaaaaaaaaaagaaaagaaaaatgggcaatggatatgagtagggagtttaccaaaaaatacaattggcctttacacatgtaaaatatgccaaaatttacaatgttagaaaaaaataaaaattgttctgagatattattcactgatcatttgcaggtatcaataagggaaaacaggatactccatatattgcaggtaggaatataaattggttcaacctctctggaggaaatttggcaatttctatcaaaattacaaatgcatgtaccttttgacccagaaaatctatttccaggaatttatctgatatatgtgcatatgcacaaaatgacttatgtacaagttattcattaaagtagtactggccaggtgcggtggctcatgcctgcctgtaatcccaacactttggaaggccgaggcaggtggatcacctgaagtcagtcaggagttcaagaccagcctggccaacgtggtggaaccccgtatataccaaaaatacaaaaattagccagacatggtggcatgtccctgtaatcccagctattcaggaggctgaggcaggagaatctctgaacccagggggttggaggttgcagtgagctgagatcgtgcccctgtactccaacctgggcgacagagtgagaccctgtctcaaaataaataaataaataaaatataaagtagtactgatagtagcataggtttggagacaaactccgtgttctccagtaggagactggctaaataaattgtgacacattaatttaatggaatattatgaagatgcaaaatactgtgaggaagctcttttttttttttttttttctgagatggagcctcgctctggagactggagagcagtggcgcgatcttggctcactgcaacctctgcctcccaggttcaagcaattctcctgcctcagcctcctgagtagctagggttataggcatgcaccaccatgcccgggtagtttttgtagttttagtagagacggggtttcaccatgttggccaggctggtcttgaactcctgacctctggtgatccacctgcctcggcctcccaaagtgctgggattacaggtgtgagcactggccagaggaacttcttaatagccttgtcttttggcacccatggggcacagtttgtgcagtgaatcggctgcgtgtggccgcagccctttttggcaggaccattattcctttcctttgtatctttagtagaggcggggtttcaccatgttggccaggctagtctgaaactcctgacctcaagtgatccgccgcctcagcctcccaaagtccttatctttgtcaacttggaggtgaggacccaagagagcaaatagggattttttggtttgttttttgtttgtttgttgtttttgttttttatgttgttttgtttgtttgtttgtttgtttttgagacagggtctcaccccgttgcccaggctggagtgcagtggcaggatcaaggctcactggagccacaacctctctgccttaatcgatcctcctacctcaacctcccaagtagctggggccacaggcgtgcaccaccacacccggctgattttttgtaactttctgtagagacggggtttcactatgttgcccaggctgctctcaaactcctggaatcaagtgatcctcccatctaagcctcccaaagtggcaggattacaggcatgagccaccacccccagagtagtttttataatttaaaaaaatccttttataccaacctcttataagtttaacctctacttgattgccttctgcttctcttatatgagtaagacttgggaatgtagaattaacttcacagtatgttactattgtgtaaaaaaaaagtggggaagtgggacgggcaagaatttgtatgtataggtatgtatttgcttagacatggatagactattgtctattcctattgctgctgtaacagattactgcaaatttagtggtttaagactacagaagtccgggctcggtggctcacacctgtaattccaacactttgggaggccaaggcgggtgaatcacaaggtcaggagtttgagaccagcctggccatcatggtgaaaccctgtctctactaaaaatacaaaaaattagctgggcatagtggcgggtgcctgcaatcccagctactcaggaggcagaggcaggagaattgcttgaacctgggaggcggaggttgtagtgagccgagatcatgccactgtactccagcctgggtgacagagtgagactccgtttcaaaaaaaaaaaaaagattacagaaatgtattctcttccagttctgagagcagacgtccaaaatgagtttcactaggctgaaaccaaggtgtctacagggtctcgatccctctagaggccctaggggctctaggatgtagtctcttgcctttctagctttcagagctgcattacctacattccttgcccccttctccatttcgaaagctagaagcacagcatcttctcgtctctctctgcttcagcagtcaaataatcttctgttggctcatgcctataatcccagcactttgggaggccaaggcaggcagatcacctgaggtcaggagtttgagaccagcctggccaacatggcgaaaccccgttggtactaaaaatacaaaaaattagctgggcatagtggtttgagctagtagtcccagctatttgggaggctgagtcaggagaatcacttgaacccgggaggcaaaggttacagtgagctgagattgtgccattgccttccagcctgggtgacagagcgagattctgtctaaaaaaatgataataataaataaattagctgggtgttgtagcacacgcctgtaatcccagctactggggatgctgaggcaagagaatcgcctgggagacagaggttgcagagagctgagatcacaccactgcactccagcctgggcaacagaatgggactctgtctcaaaaaaaaaaaaaagataaattggctcatttggtcttgttgcccccacccaggagccaactctgcacaagaggatggcttcaaccccctatatttcatcttcaacctgactaaccagcactccccacttcctggcccccatccaccaacttatccttaaaaaaccccagtctccaggcggaggttgcagtgagctgagatcgcgccactgcactccagcccagatgatagcgcaagactctgtctcaaaaaacaaaaacacccagtctccaaattttcaactgtcgacgaaaagaatcaaactctgtaaaatatgtgaagagatttattctgagccaaatgcaagtgatcctggcccatgacacaggcctcaggctcaggaggtcctgagaacatgcgcccaaggtggttggggcacattttaggaaggcatgagaaatcaatcaaatacatttgagaaatacattggtcagctggtcgcggtggctcacgcctataatcttagcactttgggagtccaaggtgggtggaacacctgaggtcaggagttcgagaccagcctggccaatagggtaaaaccccatctctactaaaaatacaacaattagccgggcaaactcaggaggctgaggctggagaatctcttgaacccaggaggcagaggttgcagtgaactgagatcccggcaagagcgaaactctatctcaaaaaaaagaaatacattgatttggtccagaaaggcaggacaactcaaagttggcggggggtgggtggtgggcaggggtttgaggctgtaggtaaatttaaacattttctggttgacaattggttgagtttgtctaaagacctgggatcaacagaaagggaatgttcaggttaagataaaatattgtggagactgggtgtgggggctcacgcctgtaatcccagcactttaggaggccaaggtgggtggatcacttgaggtcaggagtttgagaccagcctggtcaacatggtgaaatctcatctctactaaaaatacaaaaaaaaaaaaaaaagccaggcgtggtggtgggcgtctatagtcccagctactcgggaggctgaggcgggagaatcgcttgaacccagcaggtggaggttgcagtgagctgagattgcctcactgcactccagcctggtcaacagagcgaggctccatctcaaaaaaaaaaaaaagaaaaagaaaaaaagattgtggagaccaaggttcttttgaagtctttatactggctgcccttagagacaaagatgacaaatgtttcctattcagacctttaaaaggtgctagagtctcaatcttttcaagattgggagggcgtggaagaaagagatccagctatgttaatagagattctttacagatgcaaatttctctccacaaaggacggcttttcagggccattacaaaatatggcaaagaaacatgttttgggttaaaatttttcttctttgtcacctaatgttatgccagaatcagattggaaagtaagtcacaatatatagggttaagtaaaacctgtctgatgagaatttatggtttgtagggcatgaatccccagatcccttagataggaatttcatcacgataagaaaaacattagcattttaagctgggcttggtggctcacgcctgtaatcccaacagtttgggagtccaaggcgggcagatcacctgaggtcaggagttccaagaccagcctggccaacatggcaaaaccttatctctactaaaattacaaaaatcagctgggcctggtggcgtgtgcctgtaatcccagctactcaggaagctgaggcaggagaattgcttgaacctgggaggcggagtttgcagtaagctgcactctggcctgggcaacagagcgagactccctctcaaaaaaaaaaaaaaaaatcagtgcttagtcctcacaacttttggggagactgaatttgggtaacaataaaactccattcagtcagctctgtgtgaattaaaccctttctctattgcaatccctctgtcttgataaatcggctctatctgggcagttggcaaaatgaacccgttgggcagttacaattcccttttgccatatatgtttacattcacaggttccagagattaggatgtggctatctttgggggtcattattctgcctattaaataaagtctatggggtgggcgaggtggcttatgcctgtaatgacaacactttgggagactgaggcgggaagatcacctgaggtcaggatttcaagaccaacccggctaacatggcaaaaccccatccctactaaaactacaaaaattagccaggtgtggtgatatgcatctgtagtcccagctactcaggaggctgaggcaggagaatcctttgaacccaggtggtggaggttgcagtgagccaagatggtgccactgcactccagcctgggcaacagaacaagactccatctcaaaataaataaataaataaataaataaaaataagtaaataaataaaatatatgggaagccatttatttggaccgaacacttgcactagacccaacagactaaaacaaaaatggagtcactcatgccaaagttgcacgtcaccaagcaaaactaagttgttcatttgatgcaaatgggccagttttagccggcataataaggaagtcccctctgtttgcccttacaaggaaagtaacctgaagtaaccagatactaatcaacctactttttgtatttgctgttttcttgttcctgctcatgttaccttccaaacccgactgttctgccgtgcccaacagagcacctgtgtttttagatgagatgctccccattcacgcctcacaaacaaagccaattatatcattaaactaaatttgttgaaatgtggtcttttgagaaacctaacaaaactgtctgttcaaattggctctcaatctgtttgacacaatggcggtggtctttaatagtgtctttgctatctggtgtgacaagagtttccaggattctcttggcagacttggaatcagtcatcttagatgccttgttcttttttgattccggggtggggaggcggggagaagtagaaaaatggtattttgagattacaatcctaattccttttatttatttatttatttatttatttatttattttttgagacagaatctcgttctgtcgcccaggctggagtgcagtggcgcaatctcagctcaccgcagcctccacctctcaggttcaagcagttctcctggctcagcctccaaagtagctgggattacaggcacccgccaccatgcccggctaattttttgtatttttagtagagacagggtttcgccatgttggccagtgtggtctcgaactcctgacctcaggagatccacctgcttcagcctcccaaagtgctgggattacaggcgtgagccaccgcgcccagcctacaagcctaattctatatgtgctcattgctgctaggttgctcattgtttctaggccttttcagtgaagagctaagagctagaaaacacacttttttttttttcttgagacaggacctccctttttttttttttttttttgagacggagtctcgctctggcgcccaggctggagtgcagtggcgcgatctccgctcactgcaagctccgcctcccgggttcacgccattgtcctgcctcagcctctcgagtagctgcgactactggcgcccgccaccacgcccggctaattttttgtatgttttagtagagacagggtttcaccgtgttagccaggatggtctccatctcctgacctcgtgatccatccgcttccgccttccaaagtgctgggattataggcgtgagccaccgcgcccggccgggtctccctttttcacccagaccggagtgcagtggcacaatcagggctcagtgcagtgttgacctcccgggctcaatcagtcttcccacctctccctcccaagtagctgggaccataggtgcacacaaccacacccagctaattttttttttatttttgtagagacaaggtcttgctatgttgcccaggctggtctcaaactcctaggctcaagcaatccacctgcttcagcctcttaaagtgctagaggggacccggtggctcacgcctgtaatcccagcacttaaggaggttgaggcgggtggatcgcttgagcccaggagtttgaaaccagcctaggcaacatggcaaaatcccatctctacaaaacaaacaaacaaacaaaaaaacatacaaaaataagctgggtgtggtagcaccctgtagtcccagctacttgggaggctgagaggtgagaggatcacttaagcataggaggttgatgcagcagtgagctgtgatcgtgccactgcactccagcgtcggcgacagagtgagactccgtttcaaaaaacaaccccacccccagaaaaaccctcatgaattcatagtgatatttctgattcacagaaaattcagatttgactttttgttctttagacttacacgtaaatttgaatttgtctgatatgagcagcacaggtgcgtggctgagcaactgctgtggtcaggaagtccccataagccttgatgcctccagttcacagtcaaaactgctggctgggtatttacttgaccctctatacattatgtttatacagtatgtctttttttttttttgagacagagtcttgctctttcaccccggctggagtgcagtggcgtgatcttggctcactgcaacctctgcctcccaggttcaagcgattctcctgcctcagcctcctgagtagctgggactacaggcacctgccaccacacctggctgatttttgtattttttttgtagagaaaaaatacaccacgttgaactcctggtcccaagtgatatgcccacctcggcctcccaaagtgctaggattgtgggtgtgagccaccgcgcctggcccattacatcttttacatccctgattttgatttcttcctacaagtaaatatgtatttaaaattcatcatcatcttatgttaatatagacagacattttgtttgtctaatgtttgttctttggaagattcctaaaaaagaaatcatgagaacaatatttcttgagttattgcatattgatgacagtttgtggcctttatcttgaatctcactttggctaattataaaattcttggcacatatgttctttccttcagtttattaaaaaatatatactattgagttttcttttggcctaaagcactgctggcaaagtttgatgatagtttgatcttttttcctttacaaataacttggttattttgcctggatttataagaaattaaagtccaataattttactaaagtaagccttggtattggtggttctaggtcagtttcttcagacatttactgtgttctttttttttttttaaatagagatggagtcttactatgttgttgcataggctggtctcaaactactaggctcaagcaattcaccagccttggccttccaaagtcttgggattaagggtgtgagccattgcacccagccaactgtgcctgtttttttttgttgttgttgttgtttttgagacggagtctccttctgttgcccaggctggagtgcagtggcgccatctcagctcactgaaatctccgcctcctgggttcaagcgattctcccgcctcagcctcccgagtagctgggattacaggtgcctgccaccatgcctggctaattttttgtatttttagtagagacggggtttcaccatgttggccaggctggtctcgaactcctgaccttttgatctgccctcctcagcctcccaaagttctgggattacaggtgtgagccactgtgcctggctttttttttttttttctgagacagagtcttactctgtcgtccaggctacagtgcagtggcatgatctcagctcaatgcaacctctgcctccggattcaagtgattcttgtgcctcagcctcccgaggagctgggattacagacatgtttccaccacacccagctaatttttgtgtttttagtagagataccatgtttaccaggctggtctcgaactcctgacctcaggtgatacatcggcctcggcctcccaaagtgctgggattacaggtactcaccaccacgcccaactaatttttttctttttttgagacagagtttcactcttgttgcccaggctggagtgcaatgaatgtcatgatctcagctcaccgcaacctctgccacctaggttcaagtgatcctcctgcctcagcctccagagtagctgggattacaggcatgcgccaccatgaccgcctaattttgtatgtttagtagagacagggtttctccatgttggtcaggctggtctcaaactcctaacctcaggtgatctgcccgccttggcctcccaaagtgctgggattacagacgtgagccactgcgtctgacccaatttaaaaaatacatatttttagtagagaccgagtttcaccatgttggccaggctggtttcaaactcctgactgcaagtgatccgcctgccttggcctcccagagtgctgggattacaggcgtgagccactgtgccaggccatttttttttttaaattttggcaaagaggagggtcttgctttgttacccaggcggatcttgaactcccagactcaagcaatcctcccacctcagcctcccaaagtgctgggattacagacatgtattatggcacctggccatatagttcattttatttaaagagaagtcacatcgagcagtggaagtggagaaagaacaaataaatcataccttatttttattttttattattattttttttagtcagtcttgctctgttgcccaggttggagtgcaatgacaccatcttcggctcactgcaactgctgcctcccgggttcaagcgattctcttgcctcagcctcccgagtagctgggattacaggtgtccaccaccacgcctggctaatttttgttgttgttgttgtgtttttttttttatttttttgagacggagtctcactctgtcacccaggctggagtccagtggcgcaatctcggctcactgcaagctctgcctcctgggttcatgccattctcctgcctcagcctcccgagtagctgggactacaggcgcctgccaccataaccggctaattttttgtattattagtagagatggggtttcaccgtgttagccaggatggtctcgatctcctgacctcgtgatccacccacctcggcctgccaaactgctgggattacaagcgtgagccaccttgcccagcccatatctcatttttgtattaaattagttttcctgacatttatcgacgtcgtttttcctttgaccctattgattccctgctgcttggttggttttcttcccagtactttcatcccatgtggggctttgtcctggaaaggcacgctggttggtttacttttcagaatctgagtgggccagactgctcctgctccctgagtcctagctacagtctggtggttctcattcattggtataggcgccatcttgctgttgttctttttttttttttttttaatatactttaggttctgtgatacatgtgcagaacatgcaggtttgttacataggtatacatgtgccatggtggcttgctgcacccatcaacctgtcatctacattaggtatttgtcctaatgctattcctcctctagcccccaccccccgataggccctggtgtgtgatgttcccctccctgtgtccaagtgttctcattattctactcccacttatgagtgagaacatgcagtgtttggttttctgttcctgtgttagtttgctgagaatgatggtttctggcttcgtccatgtccctgcaaaggacatgcactcatccttttttatggctgcatagtattccatgatgtatatgtgccacattttctttatccagtctatcattgatgggcatttgggttggtttcaagtctttactattgtgaacagcactgcaataaacatatgtgtgcatgtgtttttatagtagaatgatgtataatcctttgggtatataatacccagtaatgcgattgctgggtcaaatggtatttctggttctagatctttgaggaatcgccacaatgtcttccacaatggttgaactaatttatactcccatcaacagtgtaaaagcattccctattttccacatcctctctagcatctcttgtttccagactttttaatgattgccattctaactggcatgatatggtatctcattgtggttttgatttgcatttctctaataactggtgatgatgagctttttttcatatgtttgttggccgcataaatatcttcttttgagaagtgtctgttcatatccttcacccactttttgatgggtttttttttcttgtaaatttgtttaagttctttgtagattctggatgttagctttttgtcagatggatagattgcaaaacttttctcccattctgtaggttgcctgttcactctgatgatagtttcttttgctgtgcagaagctctttagtttaattacatttgtcaattttgacttttgttgccattgcttttggtgttttagtcatgaattctttgcccatgcctatgtcctgaatggtattgcctaggttttcttctagggtttttatggttttaggtgttgcatttaagtctttaatccatcttgagttaatttttatataaggtgtaaggaagggatccagtttcagttttctgcatatggctagccagttctcccaataccatttattgaatagggaatcctttccccatcgcttgtttttatcaggtttgtcaaagttcagatggttgtagatgtgtggcattatttctgaggcctttgttctgttccattggtctatctgtctgttttggtaccagtaccatgctgttttggttactgtaaccctgtaatatagtttgaagtcaggtagcataatgcctccagctttgttctttttgcttaggattgtcttggctatatgggctcttttttgattccatatgaaatttaaattagctccttcaggagctcttgtaaggcaggcctagtggtgacaaaatctcagcatttgcttgtctgtaaaggattttgtttttcctttgcttatgaagcttagtttggctggatatgaaattctgggttgaaaattcttttctttaagattgttgaatattggcccccactctcttctggcttgtagagtttctgtagagagattcactcttagtctgatgggcttccctttgtgggtaacccgacctttctctctggctgcccttaacattttttccttcatttcaaccttggtgaaactaacgattatgtgtcttggggttgctcttcttaaggagtatctttgtggtgttctctgtatttcctgaatttgaatgttggcctgccttgctaggttgaggaagtcctcctggataatatcctgaagagtattttccaacttggttccattctccccatcattttcaggtacaccaatcaaacgtaggtttgatcttttcacatagccccatatttcttggaggctttgttcgttccttttcattcttttttctctaatcttgtcttcacgctttatttcattatgttgatcttcaatctatgatatcctttcttccgcttgattgatttgactagtgatacttatgtatgcttcacgaagttcttgtgctgtgtttttcagctccatcaggtcatgcatgttcttctctaaactgggttttctagttagcaattcatctaacctttttcaaggttcttagcttccttgcattgggttagaacatgctcctttagctcagaggagtttgtcattacccaccttttgaagcctacttctgttaatttgtcaaagtcattctccatccagttttattcccttgctggcaaggaactgtgatcctttggaggagaagaggcgttctggtttttggaattttcagccttttttgcgctggtttctcctcatcttcgtggatttatctacctttggtctttgatgttgctgaccttcagatggggtgtctgtgtggacgtccttcttgtttatgtttatgctattgctttctgtttgttagttttccttctaatagtcaggcctctctgctgcaggtctgctggagtttgctggaggtccactccagaccctgtttgcctgggtatcaccagcagaggttgcagaacagcaaagattgctgcctgttccttcctctggaagcttcgtcccagaggggcacccaccagatgccagtgggagctctcctgtatgaggtgtctgtcaatccctggtgggaggtgtctcctagtcaggtggcagaagggtcagggacccacttgaggaggcagtctgtcccttagcagagctcaagcactgtgctgggagatctgctgctctcttcagagctggcaggcagggatgtttaattccgccgaagctgcacccacagccaccccttcccccaggtgttctgtcccagggagatgggagttttatctataagcccctgactggggttgctgcctttctttcagaaatgccctgcccagagaggaggaatctagagaggcagtctggctatggaggctttgctgagctgcagtgggctccccaccagttcgaacttccctgcagttttgtttacactgtgaggggaaaactgcctactcaagcttcagtaatggtggatgcccccacccttcactaagcttaagcgtcccaggtcgacttcagattgctgtgctggcagtgagaatttcaggccagtggatcttagcttgctgggctctgtggggttgggatccgttgagctagaccacttggttccctggcttcagccccctttccaggggagtgaacggttctgtctcactggcattccaggcgtcactggggtatgaaaaaaaactgcagctagctcagtgtctgctcaaatggccacccaattttgtgcttgaaacccagggtcctggtggtgtaggcacccaggggagtctcctggtgtgcaggttgtgaagactgtgggaaaagtgtagtagtatctgggctggagtgcaccgttcctcaaggcacagttcctcccagcttcccttgggtagaggagggagttccccggccccttgcacttcccgggtgaggtgacgccccaccctgcttctgttcaccctctgtgggctgcacccactgtctaagcagtctcaatgagatgagccgggtacctcagttggaaatgcatcaatcacctgccttctgcgttggtctcactgggagacaagctgcagacaagagctgttcctattcggccatcttgctactcccccctctgttgttcttaaacggacacactcgtgcatgttgttccacttgctcctgtcttggggttgatgaggatgccttttagctgttttttttatttttttatttttgagatagagtctcactctgttgcccaggctggagtgcgatcctcccacctcagcctcccgagcagttaggactacaggtgtgcaccaccacgcccagaaaattttttaatttttttattttttttgtggagatggggtctccccatgttgcccaggctggtctcctgggctcgagtgatccgcccatctcagcctcccaaagtgctggggttacaggcttgagacatgacacccagccctctatgtgtttttatggagggatttatgtagtggtatttttggggtggctcaaaaaccatgtcctcacactatctttccagaatcctctcaaccttaggaaaatttgaagacatactctattgtacaacaggttgtgcagaccagtctgttgtacaataggttatgtcatcaattcatcactatcctactgcacttcatcaattcatcactatcctactgcactctctgtctccaatgccaggctctaattacacttgtcccatatcagttcctcaaacatgagcagccctttccaaatctctaggcctctgctgttgtttttctggaattgcagagttgtgtctccctcgaatgctgtccctctgaattctttggaaattcctctctatcctggttacttacttctttgatcgggcatggtggctcacgactataattccagcacttcgggaggccaaagaaggtggagcacttgagcccaggagttcaaggccagcatgggcaacacagcaagacccctttctctataaaaaatattttaaaaatcagctgagtgtggtggcacacacccgttgtcccaactacttgggagactaaggcgggaggattgcttgaacccaagagttcaaggttgcagtgagctatgattgtgccactgtactccagcctgggcaacagagtctctagaaaaagaaaaaaatccaggccaggcgcggtggctcacgcctgtaatcccagcactttgggaggcagaggcgggcggatcacgaggtcaggagatcgagaccacggtgaaaccccgtctctactaaaaatacaaaaaattagctgggcgcagtggcgggcgcctgtagtcccagctactcgggaggctgaggcaggagaatggcgtgaacccggaaggcggagcttgcagtgagccgagatcattccactgcactccagcctgggcgacagagcgagactcggtctccaaaaaaaaaaaaagaaaaaaaaatccattctcttttgtttctttttcctttttgagacgagagtctcgctctgttgcccagactgagtgcagtggtgagaacatggctcattacagcctcagtctcccagggtcaagtagtcctccccacctcagcctcccaagtagctggaaccacaggcgtgcgcccccaagcacaattaatttttttttttttttgagatggagtttcgctcttgttgtcccggctggagtgcagtggtgtgatcttggctcaccgcaacctccacctcctgggttcaagtgattctcctgcctcagcctctccagtagctgggattacgggcatgtgccaccacacccggctaattttgtatttttagtagagatggggtttcgccatgttggtcaggctggtctcaaacacccgacctcaagtgatctgcccgccttagcctcccaaggtgctgggattacaggtgtgagccaccacgccctgccagctaattcaattttttttttgtaaagatgaggtctcctcgtgttgcccaggctcgtctcgaactcctgggttcaagagaccctcgcaatgtagcctctcaaagtgctgagattacagacatgagccactgcacccagccaatttctctttctaaaaataattaatttttttgagacagtctcactctgtcgcccaggctggagtacagtggcgcgatctgggctcactgcaacctccttgtcctgggttcacccacttctcctgcctcagccccccgagtagctgggattacaggcgcccactaatatgcccagctaatttttgtatttttagtagagatggggtttcaccatgttggccaggctggtcttgaacccctatcaagtgaacccccaacctcgacctcccaatgtgttgggattataggcatgagccactgcaccggccttatgcctttaggactcttatttatttattttgagacggagtttcactcttgttgcccagggtggagtgcaatggcgcaatctcggctcattgcaacctccgcctcctgggttcaagcattctcctgcttcagccttccgagtagctgggattacaggcatgtaccaccacgcccggctaattttgtatttttagtagagatgggatttctccatgttggtcaggctggtctcgaactcccgaagtcaggtgatccgcccgcccacctcggcctcccaaagtgctgggattacaagcgtgagctaccgcgcccggccccagaactcttttttttttttttaaatcatgagttagattgatagttttcagggcaaatccaaacagtctacattaatttccgtctttatttcgttaaggtttcacatggacactggtggatatggaatggcttttttctgcgcaattcacatccgaccaggtcaagtgactggagttcaccggtctcgggtataccgcatctcgcgccaggcttcaaactctagatccccgagtctcgagctccagctgggtgtcgagacgggtacgggccggccgcgcctcgcgcatgcgccctaggcccgcagggccccgcgctggaagctcagctcccactgtaccctgctttaaccagtcaggcaattcatcttccccaagctcccaattcggcattgcctggaggcggaagtgggtgggaggggccagacgtgcgcccctccccggaagtgggcggtacccatagggctccacagtcgttccgccacctcccagtcgggttgcggcggaggccgttcctggctttgtagctcgctcaagatggcggcgcagccaccccgcgggatacgcctcagcgcggtgagcagccgcgaggggtggagcgggccgtgtcccaggagggcgggcgggcaagcgaaggggggccggcagtgggcggtggcggcttgtggggccgacgcggcggcgggggctgcggcggggcccggggagggggcggccatctcgctcccgtcggcggaacagctcggctgcgggccgggctgcgttccgtcgcctctgcattgtgtttctgttttgcttcggggcgggccagggtcgcggctcctcctcccagctccctcctagtctcccagcagctgtcgtccgcgggcgaggcctcggcgggagatcggtctgctctcggggccgcggggcccctgaccctcttctgtccgctgggcgtcgtggtgggagggagcgggttccgcgtccagaaacgccggcggcctcgacgtcccgggggcggggggacggggctgcgggcctgcctgcgggcgagtggagtcaggatgagtgtgcctgatgcctgtcagtgcctgcagcttccttggcagtggaagccttggggcccagaccctagatcgctgagctcgagctctcctctttatcccgcgttgcgtctgttttggggcgtttcgagttcttggaaaccctgtgaacatttcttgtatcttaaatcgtagggagcggtcacacaagataacttgaaatctcacgtccaggaaatgtgggcgtggcttccccacctgattatcctaaaaaacttttctaccttgtgagcgcagttgatgttatgctgaaatgttcctcttttctggaggttgttgacttttgccaaagaatgactgccctagtgccactaattttaacattcgaatgggtagtgactccttggggtacaaacacgtagtgaataattggtgcattgctctgggactttcattcgtttaggcagattctaacacctggttttgacggactttaaattttttctagtccgatatttgtgaaatgatatttgcttttacttgcgtttccttgactgtttgtgttgttgagctcttcgcatgtattagtctttgtggttttttgttttgtttttttgaattgcctattcatatcctttgaccattttctgtttttcttttgggaggatctttattgatttgtaagagttctttacgtattctggataaaggtccatcctttcgttatgtaactagcttattgagtgagctaggctttagtagtttgaaaatagaggacaattttattctttttttcttttttttttttttaaccactgagtgtaaacattaattattccccacttgtgtgaatctgggttgactaacgctttcccattagcttaaggtattgtaaagtctggccttacctagtttaaaatctctattctctctccctcccttttccccctctctttcccctatctcctttccccacttctctctccttcctctctcgaggttgagtcttgttcaggcccagaaacctgtagtggagaaacggagtgagttgatttcctgtttctgtcctttgattctcttctcccttcccgcccccaggcccttgtagactctggctcttcaagattgaggggagaaaggaagcagagataatggtcagtgtttagagaccagcattgttagcgggcactctgggtgtagctgctgtccatgtgctgggtctttgttttgtgggtaatatgggctgttgggaacctgactgacagaaatctcccatctgcagcctctttgcttttgctttaggtcaggagttggcaaactacatacagctcatgggccaaatccagcccagcacctgtttttgtgtggcctgaaggctaagagtgatttatacatttgtaaatggttgagaaaaaaagaagaatgtttagtgacataaaaattatgcgaaatacaaatttcagtttccataaaattttattggaatatagccagaaacattatttgcttatagttttcaaatgcatgcgttaagagataaaaattaatgagcttatgtatttgtcaaaagtcctacattttaaggcacaaagggtgaacccttagtgtatacacttttttattttattttatttttttgaggtagagtttcactcagtctccaggctggagtgcagtggcacgatctcggctcactgcagcctccacctcccggattcaagcacttcttctgcctcagcctcccgagtagctgggtttacacgcgtgggccaccacacccggctaattttggtatttttagtatatatagagtttcaccatgttggccaggctggtctcaaattcccaacctcaggtgatcctcctgccttggcctcctaaagcactgcgattacaggcctgagccactgtgcccggcccaatgtatacacattttaaacagtcatttaggaggtcggagatcccaggatgaaatgcagagtgacaaaaagtttttaaattttttgctttttacccctgtaattctagtgaaatgaaatgcatatactttggtttttgttgttgattttttttttcagaaatgctgctgtggatttagctgatgcacactcttcaccacctcccatacttcaatgcttttttcactttttttggttgaattactatatggtttgttattactcttacaaatgagctagccagggtagtatgattgcattttctttcctatacaaaccttttgttttccctgaagttaattgatttatattttgttttcttagtttttctctgtactgatcatccagacatccagagaactgggagctcttttccagatggattcagacacacccagtgttttgtcatttggaagtcagttgggagtcatcggctcagtcgtaatttggggacttccctttaacatctgtctggaaatttccttcctcttttcatgtgtctccatctcacatatccttctgtctgatatgtagcttagtgactgccattctgaagcctactctctcgggttcaaatcctgactcataaccagatgtatgtccttggccaagtcatttaacctctttgtgccagagtttccaatctgaatgttggcaataataatcttacacacctcaaagtgttgttttaaaaattacatgagcagatagataaataaaagggctgtgcgtgccgtaggtgcacaataatgtttgctgtttttgttattgttagtggtggagaatatccaccactaacaataacaccacttccagaaacaggtgtagcttcctgaaaaaagggttcatgggaagaaaaaaatttcatcatttcttgaaaatacattcatgctacccttgctctttctttaattataatttggctggatttgcattctggattggaaattctttccgaattttaaagacgtgcttgattgtttaatagagcctctgcattttattgggcacttagcctggaagctcaagtccttaacatctggaaaatgttcttacttattttgacaattttcttcgcaccatttttctctttttttatttactgtcttattgtttttcctcttgggggatttcctctacttatctcctaccttgctcttaccatagtgttttttttttttagagacggagtttcgctcttgttgcccagactggagtgcaagggcgtgatctcggctcaccgcaacccctgcctcccgggttcaagcgattctcccgcctcagcctcccgagtagctgggattgcaggcatgcgccaccacgtctggctgattttgtatttttagtagagatggggtttctccatgttggtcaggctggtcttgaacttccgacctcaggtaatctgcccgccctggcctcccaaagtgctgggatgacaggcatgaggcaccgagcccggccaccatagttttaattgttacaagcaatgtcttagcttttgaatgtctttttgaattctccctggacaaaatgttcattcttattgctagatacattaactgtagttttttttttttttgagatggagtcttctcgctctgtcgtccaggctggagtgcagtggcgcgatctcggctcactgcaagctccgcctcccaggttcacgccattctcctgcctcagcctcccgagtagctgggactacaagcacctgccacgttgcctggttaattttttgtatttttagtagagacggggtttcaccgtgttagccaggatggtcttgatctcctgacctcgtgatctgcctgcctcggcctcccaaagtgctgggattacaggcgtgagccaccatgcctggcctaaccgtagtatttttgaagttttgttttgctcactgcattatctctattttcttcatgtttcttttactgtgtattgtttttggtttctaattttaaacactctcaaatgtctggaaacagccttctcatttttttttttttttttgagccgggagtttcactcttgttgcccaggctggagtgcagtggcatgatctcagctcactgcaatctccacttcccaggttcaagcagttctcctgcctcagcctcccaagtagctgggattacaggcatgcgccaccatgcctggctaattttttgtgtttttaatagagatggtgttttaccatgttggcctggctgatcttgaactcctgacctcaactgatccacccgcctcggcctcccaaagtgctgggattacaggcgtgagccaccgcgcctggcagccttctcacatttttaagtgagacacttaaagctgactgcaaaattttcatacatgaatagagctagtcctttggtgggcttcactgttgggtgatcacataggaaggagtcattttgttgggggtgctctatgttggtatttgtagaccataaaaaatgggaactgttggaccataagtatatttttaaaaactgaaaattttaaaaagtaattttaaaaaacgagaacaacaaaaacaagatgctatccagaaaagccaggcggaattgctaagaaccaaatagaactttgagaaatcagcttcccaaggaggaattctacgtctggtctcctgccatggcataattctggctgctagctcttggaaattggcatgaaaggaagaaaggcgtatcacattgttcagtttgctgacttgctgtttgtttgattatttgtttattattgtaataaaacacatgtagcaaacaatttatgctaaccattttaaagtttcaattcagtagtgctaagtacattcacatggttgtgtaataaccagtctccagaactcttcttgttgggaaactaaaaccctgttcccgttaaatagtaacttctccagcacctgacaaacactattctactttctgtctaggaatttgactacggtagtccccccttatctgcagttttgctttcttcggttttaattacccaaagtcaaccatggtctgaaagtattaaatggaaaattgtagaaatagttcataaattctaaactgtgcccccatctgagtagcacctggaatgtgaatcatccctttgtccagtgtatccacactgtggatatatgatgccaacctattagtcacttagtagctgtggttatcagatttgctgttgttgtatcattctattttattattaaattattgttaatttgggcgcagtggctcacgcctcagcactttgggaggccgaggcagggggatcacttgaggtcaggagttcgagaccagcctggccaacatggtgaaacccagtctctactaaaaatacaaaaattatttgggcatggtggtgggtgcctgtaatcccagctacttgggaggctgaggcgggagaatcgcttgaacccgggaggtggaggttgcagtgagctgagatcgcgccattgcactctagcctgggcaacaagagtgaaacttattctcaaacaaaaaaaatagaataaattattgttaatttggccaggctcggtggctcatgcctgtaatcccagcactttgggaggctaaggcgggcagatcacttgagatcaggagtttgagaccagcctggccaacatggtgaaaccccatctttaccaaaaataaaaaaaaattagccgggcatggtgacacacaaccgtggtcccagctactccagaggctgaggcaggagaatcgcttgaacctgaaggtgaaagttgcagtgagccacaccaccgcactccagcctggacaacagagcaagactccatctctatataaataaataataaaatgtttatttcttactgtgccttatttataagttgaactttatcatacatatgtatactgcagttttaggaatccactgagggtcttgagatgcattctctgagaataaggggagactgctgtactcctatcagtggaattatacaatatttgacttgtgactgccttattcattaatgtcttcacggttcatccatgttgtagtgtgcgttaggatttccttgtttgcttaaggtgaatattttattgtatgtcagaagacaacattataaatttaaagatttttttttttttttgagaccgagtctcgctctgtcgcctaggctggagtgcattggtgcgatctcggctcactgcaacctctgcttcccgggtttaagcgattcttgtgcctcagcctccctagtagctgggtttacaggcacctgccaccacgcccggctaattttcgtatttttagtagagacgggttttgccatgttgcccaggctggtcttgaactcttgacctcaggtgatccgcccacctcagcctcccaaagtgcgggggttacagcaggcgtgagccagcgcgcctggcctcaaatttaaatttaaagatattaattggctttatttctttttttttttttttttttttttttttgagacagacactcccaggctggagtgtagtggtgagatctctcagctcactgcaacctcttcctcccatgttcaagcaattctcctgccacagcctcctgagtagctgggattacaggcgctcaccaccacacctggctaatttttttggcttttggtagagacggggttttgccatgttggccaggctcgtctcctaacctcaagtgttctgcccgcctcagcctcccaaagtgctgggattacaggagtgaaccaccgtgcttggcctttatttcctattctggaattgggcaacacttcttccataaaatacagtaagtgttctagtgaactgaacagaggaggctggctttgtagacagaaaaaggccgaaagaaagcagaaacaaagaacaaaaagcagatacgtcatttcaaagttaaaaacaatagataaataactgactgacattaggttactttttgttgtaaaacaacaaaatggagggaacttattatctgtcataccagttgatgactgaaactgacctgttcggtaaattggctgttatctcccttgatttcgctgaaggtcagataacaacttagtttcagtttggtgactgaaattttagcatgggtgactccattttgatttttagtctgtttttggaggcctagagcaggagcttagtccaaaacagtggcctccttttttgtttttttttttctgagacagagtcttgttctgttgcccagtctggagtgcagtggcatgatcttggctcactgcaacctctgcctcctgggttcaagtgattgccatgcctcagccacccaagtagctgggattacaggtgtgtgccaccaggtctagctaatttttgtatttttagtagagacggggtttcaccatgttggccaggctggtctcaaacacctgacgtcaaatgatccacctgccgcggcctcccaaagtcctgggattataggtgtgagccaccacgcccagctgtcctatattttttatttcacatttacatacatttgatatgatcaaaaatgtatatttgttctttgtcctggttcttggcactggagttcctgaaatctttggtatttcctgataactatgagtggaacatcttttgttatttataataataagcccccccccgccttttttttttttttttttaaccacaccttagttcatgctccctctgtcgcccaggctggagtgcagtggcgccatcgcagtctccacctactgggttcaagtgattctcccgcttcagcctccccagtagctgggacacaggcgcgcaccaccacgcctggatattttttgtatttttagtagagacaaggtttcgccatgttggccaggctggtcttgaactcctaacctcagttgacctactcacctcggcttcccaaagtggtgggattacaggcatgagccaccgcgcctggccaattttttgtatttttaatagagacagggtttcaccatgtcaacgaggctggtcttgtactcctgacctctggtgatccacttgcctcagcctcccaaagtgctgggattacaggtgtgagccactgggcccagtctgtaatatcctttacattgtatcttttagcttccctgggccacattggaagaattgtcttgggccacattggaagaagaattgtcttgggccacacacacataaaatatactaacgatagctgatgaggtaaaaaaaaaaaaaagaaaaagaaattgtaacgatagctgatgaactacaacaacaacaaaaaaaatcacgaaagaaacttcataacgttttaagaaagtttacaggccgggcagggtggctcatgcctgtaatcccagcactttgggaggccgaggtgggcggatcgcctgaggtcggcagttcgagaccagcgtggccagcatggtgaaatcatgtctctaccaaaaatacaaaaaaattagctgggcgtggtggcagttgcctgtaatctcagctacttgggaagctgtggcaggagaatcgcttgaacccgggaggcagaggttgcagtgagccgagattatgtcattgcactccagcctgggcaacagagcgagactccatctcaaaaacaaaaaaaaaaaaagaaagtttacaaatttgtgttgggctgcattcaaagctgtcctgggccacatgcatcccatgggggctgagggttggacaggcttgctttacaatgaatcagtgttttttttgggttttgtgagcattatagcacattatcaaacatgaggggaatcatgtgaatgcccaatttatggttggtctgtcagaagtacaggagactaagggtttatagtagttgactaatttctccttgtttggtagtataaaccaaaaataaaattctaaggctcttccaaccattttaatggacttccttctcagccagggcactcttaacatttaatctgaaagactagttcaggccatgacaggaagttggggtcagacctgcttcattatactgctctggcgtaacatcacataacaaggaaagaaataaaaataattctaaatagatttccttgtcatatcttgaaattgccttgcaaagtttgtctcttgtggaaaaaaatgtacattgtgtagagaatcctcttttcccttttttcttttctttttttgtttttttttgtttttgtttttgagacggagtttcgctcttgttgcccagattggagtgcaatgacctgatctcagctcactgtaacctccgcctcctgagttcaagcaactctcctgcctcaacctcccaagtaggtgagattacaggcatgagccaccaggcccagctaattttgcatttttagtaaagatggggttttatcatgttggtcaggctggtctcaaactgctgaccttgggtgatccaccagccttggcctcccaaagcgctgggattacaggtgtgagccaccagacccgtcctgagccaccgcacctggccattcccttttttttttctttccagatccaggagataatcaattaagagtcaggcacccttttcagtctcataagaaaacattttacagcctcttctgtcttatgcctgctagctaagagcttcctctgcgtagtaaaactttggtctccacaatccttgtcttaacccaaacatttcctctctgttgatcccaggtccttagacaaactcaaccaatcttaaccagaaaatgtataaatttacctatagcctggaagtccccgctttgacttgtctcgcctttctgaaacaaaccaatgtacatcttaaatgtatttcattgatacctcataccaccctaaaatatataaaaccaggctgctccccgaccacctcaggcacatgttctcaggaccacctgagggctgtgtcatgggccatggtcactcatatttggctcagaataaacatcttcaaatattttacaaactttgactctttttagtcgacagtagccagaggttttacaccccaaggccatgtcccatggttaagatgtagagtgggggaggagtgtatcattcttttatcagtggtagaatgatatttgtacaggggagaaggtgggacaggaaagttttcctgatggctcacttttgaaaaaagacttcttgtgcaagatgaagagctagaaatttagtttcattaagaactgtttgtgatgtgtgctttagaaagtcttgagttacctatactccatatttcacggatgtatgctgtattatgtgatgtctgccagagcaagtctaaattgcatatataccagtttgaacagtcttcttcaggatactgtttctcacttgtgtgcttcaacttaatggtaaatgaaggttttggaattgtccagaagcaagtgtggacagaggagaagtagacctttctgacaccttgtggcagcacgtgagcactacagatgtggttggcttgatctacagtctaatcatatttttagggctcttcacactgcaaagtgctttccaccttttttccccttattaggagagaatctgttcagaatgaacaaaaaaattgcatgaaaattctctgcatactgaaatttttaaggctctgccttttaaaactacttgtgtgtttttggccaggcacggtggctcatgcctgtaatcccagcactttgggaggctgaggtaggcagatcacgaggtcaggagattgagaccatcctgcctaacacggtgaaaccccgtctctactaaaaatacaaaaaattagctgggcatggtggtgggcacctgtagtcccagctactcgggaggctgaggcaggagaatggtgtaagtaaacccggcgggcggagcttgcagtgagctgagatggcgccactgcactccagcctgggcagcagagcgagactccatctcaaaaaaacaaaaaacaaacaaaaaaactacttgtgtgtttttatacatttggtacgtaccactactcaggaacttaagagagttcccaatagcatgaggttgactggcatattcttccataatgaattgtgagtaaaatcaggcataaaagccttgggaattaagatgcaatgcaaatttgttgcattgcgttcaaacgaaaaaccttagacaagttaaagttttattgagcaaagaatgattcaagaattgggcacattgggcatagtggcccactcctgcaatcccagcactttgggaggccaatgtgggaggatcacttgaggctgggagttggagaccagcctgggcaacacagtgagactcctgtctctacaaaaaagtataaaattagccaggcatagtggtccatgcctgtggtcccagctactcgggaggctgagggaggagaatcacttgaactcaggagttcaaggctgcagtgagctatgattgcactactgcactgcagcctgggcagcagagagagactatctctgaaaaaaataagaggctgggtgtggtggcttacacctgtaatcccagcactttgggaggctgaagagggtgaatcacttgaggccaggagtttgagaccagcctggtcaacatggcgaaaccccttatctactaaaaatacaaaaaattagccatgtgtggtggtgcgcacctgtaatcccagcaactcgggagtctgaggcaggagaaccgcttgaacccaggaggcggaggttgcagtcagccgaaattgtgccactgcgttacagcctaggtgacagagtgtgattctgtctcagaaaaaaaataggacaggcttcagaaccggaacaggttctaagcactctggcctgcaacgtgatcaggcaatatttatggacaaaacaaaagtgagatacagaaatagtttaattggttgcagcttggcattttgccttatttaaatcagctggtgacctgtgattgaccgaagatgggattctgtagttgactgagactcagctgtttgttactggagtacaaattgccctaagttagaagaatttgtacagttagttttcatactattaggttgtagttccttatgtactgactcgagtatggaggcatcctcaggccaagtttagtttagtttaacaattggaactctttctttttttttttttttgagatggagtctcgctctgttgcccaggctggagtgcagtggcacgatcttggctcactgcaagctccatctcctaggttcatgccattctcctgcctcagcctcccgagtagctgggactacaggcgcccatcaccacgcccaggtactttttttgtatttttagtagagacgggtttcaccatgttagccaggatggtctcgatctcctgacctcgtgatctgcccgcctcggcctcccaaagtggtgggattacaggcatgagccactgcgcccggccaacaattgtaactcttatttgaattctttgaagagtttgtagatgtatactactacactgctacaagttcagctataatgaacttggagtaaataatgaagtcacagtgccagaaaaacttagtgatcaagcacagttaagtttattaggcctgatacacgtaggagaaagtgcctccttgacaaagtcttagttgtgtctcagaatagagaaattaggaaatggtgtttataggattttagggccttggctggatcattttaaggtaggtcttggcaaggtatgtccctatttgggattggacagttatgacattgtagacataaagagggcaagggttttgaaccaagtcttggtgagtaagctgtttagttggttcccagtgttatcttccaagaatcgtatattctagattgtatcttccagatgtatcctggagcaagcagctaagtcacttttgtttggtctcaatgttgtttaacacagggataaaaatactggtttttattttcaaaagtaagacctgaattaatttacatggaccttttgtttgtttcagctttgcccgaagtttttacatacaaattctactagtcacacctggccattcagtgcagttgctgaattaataggtatgtagtttgacatttcatataccatttgttgcttacaattgtagtgtttttttttttgttttgttttgttttttttttttaaacagagtctctctctgtcgcccaggctggagtgcagtggcgcagtctcggctcactgcaagctctgcctcctgggtacacgctattctcctgcctcagcctcctgagtagctgggactacaggcacctgccaccacgaccagctaatttttttgtatttttttttagtagagacggggtttcactgtgttagccaggatggtctcgatctcctgacctcgtgatccgcctgcctcagcctcccaaagtgctgggattacaggtgtgagccaccgcacccggcctacaaaaatattttaaaaatcagctgggtatggtggtgcaggcctgtggtcccggctactcaggaggctgaggtgggaggatcacgtgagaccgggaagttgaggctgcaatgagccgtgattgtgccattgcattccagcctgggcaggcgacaaagcaagaaaaaaaacagataccttgaatgataacattaatgataaaaattgcatagcataacagctattcacatggatgtcagattagtcactgttcagctttctctttaatactacccaagtatttcatagtgtttaggatttactttgctaagttcctgaagtgtttatattgaaaatatttttatttttattataaaagtaaacagtgagaattatggggaatttgtttgcttattttgagatgaggtctcaccatgttgtccaggctggtctcaaactcctgggctcaggcgatcctcccacctcagcctcaggagtatctgggatgacaagtgtgcaccacagtgactggcagaattatgtttattagtagtacaaaagtatgtgtaacatacagcatggattcatttttctggtatcaataggaggattggtattgtgttagatatgtaataagttcttgcttctttcaataaatgggaagtttaaggtttaggattgtattttaacagcatttcaatgaacgtgagaaagcggcaaggttgcggtctgatttgcatttatgggtcatgatttttttcttgggaaaaattcatgcataggctgggcacacagttgttcacacctgtaatcccaacactttgggaggctgaggcaggaggatcacatgagcccaggagttggggcccaccctgagaaacatagtgggaccccatctctacaaaaaatacaaaaattcgccagggtggtggtgcacacctgtagtcctagtgactcgggagtctgaggtgggaggatcactcgagccagggaagtcaaggctgcagcagagtgagtcttcctccagcctgggctacagtgagaccctgtctccagaaaaaaggaaaagaaaaagaaaagaaaaattcatgcacacaaacataagcctaattgaaaaatttaggcatatgtttaagaaacagataataaagggaaattgtattcttaggaattcttagatatattttagaatctttatcaaggaagggttctatcatagatggaagataaaagaaaaagaaggaatttttttttttttttttttttttgaggcagagtctcgctctgtcacccaggctggagtgcagtggcacagtctcggctcactgcaacctcctctacctcctgggttcaagcacttgtccctcagcctcccgagtagctgggactacaggcacatgccaccgctcctggctaatttttgtatttttagtagagacagggtttcaccatattggtcaggcttgtctcgaactcctgacctcaggtgatccacccacctctgcctcccaaactgctgggattacaggcatgagccgctgcgcccagccctatttttcatttttaaacgtatttcttcctacacctattctgagagaaatgagtatgctaaacaaggatgttaaatggagaagtatacagaaataaaaatgtaaaagccaccagaaacttggtttaacttggttaaactgaaaaggatcacaatttaaagaaatagtagaaagtaaatcttccatccttgtatgtaacttagcagaaaatgttgctgccttttcatttatttattgattattgtgtaccttccattgacactcagatctctttcccctacaatagccaggttagtctctctctttttttcttttttttccatttttgagacggagtctcgctcttgttgcccaggctcgagtgcaatggcgctatctcagctcattgcaacctccgcctcctgggttcaagcaattctcctgcctcagcctcctgagtagctgggattataggtgcccgccaccatgcctggctaattttttttttttttttttaatacagatgggatttcaccctgtcggccaggctggtctcaaactcctgacctcaggtgatctgcccacctcagcctcccagagtgctgggattacaggcgtaagtcaccatggtcagcttttttgtttttgtttttgtttttgtttttggagacagagtcttgctgtgttgcccaggctagagtgcagtggcacgatctccgctcactgcaacctctgcctcccaggctcgagcgattctcctgtcttagcctctggattagctgggactataggcatgtgccaccatgcctggcggatttttgtattttttagtagagatggggtttcaccatgttggccaggctgatctcaaactcctgacctcaggtgatctgcccgcctcagcctcccaaagtgctgggattacaggcgtgagccaccacatgcagacttagtccatcttttaatcatctctgcagtgtagtgatttttcttcctttgtacttctttggtgtgctgggtaccagtctttgctgtctctttaacatggagggtgttaattctataatagtcgattaatatataccaggatgcagtttattttcatgtttttaaatcttattttcatgtttaaaatctttaaattttaaagctgctaaaaattgcagcttttaaagttgtcttaaaacatagtcttctattgcttcttacaggattgttctgaactaattgctctttttaaagtgtaaaatcagaatttcttcaaacttgtgtttcccagataatgcttatgatcctgatgtgaacgctaaacaaatatggattgacaaaacagtgataaatgaccatatatgcttgacattcaccgacaatgggaatggtatgacttctgataaattacataaaatgctaaggtaggtaaaaatgtgccacacttcttaaaattgttgcttttacctaaagggttttccatgccatacttactattcttggtttttgttttttgaaatgaaatgctgtatgtacagtgtgagctgttctctaagcatgattttctactactggtagatgatgagtcagtcttcaccactgtcatcacctaccccaccctacttccaactccctaaaagtccaccattcctttagagttgtagtatatttatatcaattactgataactttagtgtaaattaggtttaaccattgtttgtaataaaacctaccactttgttgggagtaacttttagaggaagagattcatggggtgaaatctcacagtcccggaagcatgggttatactcagctatttagtcagggtgtgccagcgatgagtttgcatgttagtacttgtgatcctttttctcccctgtgatgtagatttggtttccttatttcagagctgggaaaacacgtcaagatagattaaaagtaatctgcccgatacataaaaaatcaacaacaacaaaaaagtaatctgcccaagattatacagctaggaagggtgaggccagtatttgaacccaggctttttacttggtattacaattaatgaattaaaaaaaaagattataggtatttatttatttatttatttttgattataggtatttatttttaaaaatctttattttcttcttagctttggcttcagtgacaaagtcaccatgaatggtcatgtcccagttggattatatgggaatggcttcaagtcgggttctatgcgtctgggtaaagacgcaatcgtttttaccaaaaatggagaaagcatgagcgtgggccttttgtctcagacctacttggaagtcataaaagcggagcatgttgttgttccaatagtggcattcaacaagcaccatatccttttggttgtgaaataaaagctgtggagaaactgaagaaataatttggaaacattctatgtttttgccttcttccagattattccctttgaataacacctattccatttcttacctctgtcctctgcatttaccctacacctgaggctaagggtttgtccctttctcttctctgttggaatcctgctatggaaatactcaacattttatgttaaacttcccatagctcttctgtttacttcagggttattgtagactagtaagactttatggtttggcttgaaaatttgactagtgaccacaaaaggcaggataactttaggaaaatgccttttgtatgaacacattggaatattagaaagtattaagttagttaggaataataatctgcttattttttattcttcttcttgttcatttgaaatcaaactgccatgttaaaacttagaaaataggctgagctcggtggctgatccctgaaattccaccactttgggaggccaagacagaaggattgcttgagcccggaattttgagaccagcccaagcaacgtagggagaccctatctctacaaaaaaaatttaaaaattagccggtcgtggtggtgggtgcctgtggtcggtcccagctaggctgcagttagccctgatcatgttactgcactctagcctaagcaatagtgagaccctatctcacaaaaaaaaaaaccttagaaaattatttataaatagtttttctgttatttaagtttatagagttagttttcatattgtaattatgaaaactatgttgtcaatctgagtctttaacttatgatatacgacagatgattaatttagcagaatcaaaagccagccttgctgcaattctggaacattctctgttttccacggaacagaagttactggcagaacttgatgctattataggcaagaaggggacgaggatcatcatttggaatcttagaaggtaaacgtggacatagatgttgaccgtttgggaagtaaagtgcacgtgcagggtggtggtgttatattcatctctcgttacacacagtagaaatacatggaaaggtactcattttttggtgtagttactgatttgtctttgcccaggatatgttatagaggccatttcagcttcaatttgagatattttcatcttgttaaaaaaaatttttttttgagacgaagtctcactcttgttccccaggctggaatgcgatggcgcaatctcagctgactgcagcctccgcctcctaggtttaagcgattctcctgcttcagtcccccgagtagctgggattacagtcgcctgccaccatgcccggctaacttttgtattttagttgagacagggtttcaccatgttggccaggctggtctagaactcctgacctcaggtgatccacccgccttggcctcccaaagtgctgggattacaggcgtgagccaccacacccggccaaaaaaaaaaatttttttctatccctgccattcagtctccattagcactctattctctctcatttattccaccccgtcttctcaaaaaaaaaaaaaaaaaaagaaaaaagaaaaaaagcaatgagaagacaaattcaggaggataaatctttcttcattgtgtacattacttaaaactaaaagtgatgtagcacctgatgagaaaagtaatataggtgagatttttgtgttgctaaaatttataatcctttatctttgtgaggataaaatccttcgcaaataaattttaaaatttaagactaatgtctaatactgaaagatctaagacatactgaatcacaggaataaagcacaggtagtgataagcctaaagaactgaaaaaacttgtgctattctgatacctgaattcgtttttcttgctttcacttccctacccctccttctcctggaggattttttcaattatactttctgaggtaattgtagattcatgtgtagttgtaagaagtaatagagagatgttaggtacacttcattcagtttcccctgctggtaacatctaacaaaactatagtacagccaggcacactggctcacacctgtaatcccagcactttgggaggctgaggcgggtggatcatgaggtcaggagatcgagaccatcctggctaacacggcgaaaccctgtctctactaaaattacaaaaaattagctgggcgcggtggcgggcgcctgtagtcccagctactaaggaggctgaggcaggagaatggcgtgaaccagggaggcggagcttgcagtgagccgagatagcaccactgcactccagcctgggcgaaagagcgagactctgtctcaaaaaaaaaaaaaaaaactatagtacagtagtactattgatattgacaggattttgatgttgatacagtcaagatgcaggacactttagtcatcacaggaatccctcatgttgctcttttgtagccatacccacttccctcataaccccactccctccttaatccgtggcaacctctaatctgttctctatttctataattttgccattttaagaatattacataaacaacatggaaaccttttggatttgacttttttcacttagcataactcctggcgttttccaggttcttgtatgtatagtttgcaccttttcctttttcttttttttttctttcttttcttttctttctttctttcttttttttttttttgagatagcgttttgctctttcccccagggtggagtgaagtatagcgccatctcggctcactgcaacctccgcccaccgggttcaagcgattctgctgcctcatcctcccgtgtggctgggattataggcacctgccaccatgcctggctgatttttgtgtttttagtagagacagggttttgccatattgaccaggctggtcttgaacttctgacctcaggtgatccacatgcctcagcctcccaaagtggtaggattacaggcgtgagccactgcacccagccagtttgcacttttttcttgctgagtagtgtttcattgtatgtatggaacccagtgtgtttacctattcaagacatctaggtttgtagttttgggatattacaaataaagctgtaaacatttgtgtacacagttttgtgggaatatagtcttcatttttctgaaataaatatctagaagtgtaattgctgtatcatatagtacttgcattttattttctaagaaatgccagactgttttcctgagtgttttcctaccagcagtgtatgagtgttacagtttctccacatcatccaggatccgttttctttctttttctcttgcctttgcacccccaaccccccactgacgtgcaccatgtgtaggtttatttatttgcttacctttttaatgacttacagtgtttgctggcttatcttgctgtgaagttaaattttggttctttctaaaaattatttttacagctacaaaaatgcaacagagttcgattttgaaaaggataaatatgatatcagaattcccgaggatttagatgagataacagggaagaaggggtacaagaagcaggaaaggatggaccagattgcccctgagagtgactattccctgagggtatgtattcagctctctttgtggaagtgagaaaatcattgaatgctggtagtattaggagaggtcatgttacctgcttgtgatagaaaggctgccagtgctctctaaatgaaagtatctcagacatgattttccctggcccactcagcctgggcaacagagtgaggctgtatcacacacacacacaaatttagttaaacttttcattagcacactggttgatttatttgtttggaaaccctttttaaattatgaagtcgtcaggcctaacaatgcttgtagtttttactatatgctgacattattatcttattagaatcaatatattagtcagtatatggtggccagactaattcaaaaaacaacaaattcaaagtcttattaaattttaacgtatttgcccgtgcacggtggttcacacctgtaatcccagcactttgggaggccaaggtgggtggatcacaaggtcaggagttcaagaccagcctggccaagatggtcttgaactccgtctctactaaaaatgcaaaaattagttgggcacggtggcaggcacctgtaatcccagctactcgggaggctgaggcaggagagtcgcttgaacctgcaggtggggcagtgcggttcacggaggttgcagtgagcggagattgtaccactgcactccagcctaggtgacagagtgagacgccatcacacacacacaaaaaatttaacgtattctagaatacataccttaattgtcctcctaaagcaataaattatagactatagttagataaggtacattaatataattttgtgataaatgcctctaggattttccctttagaaatgaggtttttgtttttttgtttttctttttggagattaggtctttgggtgtcactctctcacccaggctggagtgcagcggtgagatctcagctcactgcagcctctgcctcctggccccaagcaatccttccacctcagcctcctgagtagctgggactgcaggcgtgtgccaccacacccggctatttttttgtatttttggtagagacgatgtttcaccaagttgtccaggctgatctcaaactcttggtctcaagtgatccacctgcctcagcctcccaaagtgctgggattacaggtgtgagcctctgcacctggtcaaaatgagtatctgtttaagattaaaagaaatgggctaggcacagtggctcacacatgtaatcccagcactttgtgaggcagagacgggtggatcacctgaggtcaggagttggagaccagcctggccaacatggtgaaatcctgtctctactaaaaatagaaaaattagctgggcacggttgcgggagcctgtgatcccagcggcttgggaggctgaggcaggagaatcccttgaacccggcaggcagaggttgtggtgagccaagaccgcaccattacactccagcctgggcaacaagagtgaaactctgtctcaaaaaataaaaataaaaaaaagattggagaaattaatatcttgatataataatgtcgataaattaatatcaaggtttttttgtttgtttgtttgagacggagttttgttcttgttgcccaggctggagtgcaatggcatgatcttggctcaccacagcctccacctcctgggttcaagggattcttctgccacagcctcccaactagctgggattacaggcatgcgccaccatgcccggctaattttgcatttttagtagagacaaggtttcaccatgttggccagactggtctcgaactcccgacctcagtgatctgcctgcctcggcctcacaaagtgttgggattacaggtgtgaaccaccgtgcccggccaatatcaagttttttagttgttttgataagacatgtgatactaactttttgctttctttttttttttttttttgagacagagtctcactctgttgcctaggctggagtgcagtggcgtgatctcggctcaccacaacctccggctcctgggttcaagcgattcttctggcacagcctcctgagtagccaggactacaagcatgcactaccctgcctggctaatttttgtatttttagtagagacagggtttcactatgttagccaggcttctcttgaactcctgacctcgtgatccgcccgcctcggcctcccaaagtgctgggattacaggaatgagccaccttgcctagccactttttgctttatttcttgtgttgatattattctttaatcccaagctgtggatgtatttgtcatttacagatttttcatgtaatttttgctaaggtcttagcaattacattattagtaatagtaatagtaaatagtagtattactatttactaaaatagtaaatagcagatatttactgttccttgatgtatcctaatgtgttcctagtgttgaaaaagtcttattcaagtatgaaacaggttcagaggcagccagagaagatggtatggttttagtacactacaaaatacagtgttttttaaatgacgcaaagcaccacttcttttgaaatcaagagtcaggaaaagtaggagaagcttttaagttttagttttgtgttgaatcttttttttttgaggtgggggggtctccctctgtcccccacactggagtgcagtggtgtgatctcggctcactgcagcctccgcctccatacttgacagaaaaatcagaaaatgtacctttttgtacatatatacattttttaaaattaaaatgtgatcataccatacgtgctgttttgtaatctttttcacttagtaataaatatatcagcatctatatagatcagttgattgtattctgcaagtcatttttactggctgcggtatattgagcttatttttaatgaaaaataaccaaatcagaataacatacagctttatagcctattttattgaagagttaattgatcttttatcaagttaataggagagcttctgtgtaaatccatgtctaagtaatggtgagcaaacctgtagatactaacttcttgttatgttattttccaggcttattgcagtatattatatctaaagccaagaatgcagatcatcctacgtggacagaaagtgaagacacagctggtttcgaagagtcttgcctacatcgaacgtgatgtttatcgaccaaaatttttagtatcctttttctgattccttatagagatatgttagtcaggtgtattctcttttgcccctttccccttatatgctgatagggattctagtctgctctagctttgccctcctttgtgtgcttttggacttaccaaataatgaaatagaaaggatgatttgaactgagtgaggtgttgtgttcaaaatttaccttaatattttaagtctaaaacagtgagaattacctttggattcaactgcagaaataaagatcattatgggataatgatgtatcacagaaatagactcatcaaagcttatgaaaaagttggatgtcagttaagggtaagctttattttttatttgaaaagaaaatgtctattttccacaaaagttaggataatatatgctcttgagtcaaatgttaaataattttattgtaccttttgcctatagctttttaatgtaaatttgtaaaaaataacactgtggtatttgaacttttattaactcccctcccctcccctcccttcccctcccctgccctgccctctcctttcctttcccttccttttttttgagacggagtctgagtcttgcccaggcttcagtgcagtggcacaatcttggctaaactcactgccatattcaccttctgggttcaagtgattctgctgcctcagcctcccaagtagctgggactacaggtgcatgccaccacgcctggttttttttgttttttgttttttttttgagacagagccttgctctgtcgcccaggctggagtgcagtggcgatatctcggctcactgcagcctctgccttctgggttcaagcaattctcctgcctcagccttccaagtagctgggactacaggcacgtgccgccacgcctggctaatttttgtatttttagtagaggtgaggtttcagtgtgtcagccagcatggtcttgatctcctgacctggtgatctgcctgcctcagcctcccaaagttctgggattacaagcgtgtgccaccgcactcggccagttgttttgtatttttagtagagacgaggtttcaccgtgttgtccaggcttgtcccaaactcctgacctcaggtgatccacccgcctcggtctcccaaagtgctgggattacaggtgtgagccaccgcgcccggctttatttttattttttgagagactctacctggctggagtgcagtggcgcaattttggctcactgcagcctctgactcccaggttcaagtgatcctcgcaccttagcctcctgagtagctgtgactacaggtgcatgccagcaccttaatttcttttatttatttatttgtttgtttattttttgagatggagtctcactctgtcacccaggctggagtgcagtggtgtgatctcagctcactgcaacctccacctccctggttcaagcgattctcgggccttagcctcccaagtagctgggactactggcgtgtgccgctatgccaggccaaattttgtatttttagtagagacggctttaccatgttgaccaggctggcctcaaactcctgaactcaagtgatccacccacgtcggcttctcagcgtgctcagattacaggcctgaggcaatgcgctcggcctagtatattaattttgtatttgatcctgaacagccctgaggtggggacagaatatttcttttatccctattttatgcataaggaagttggggaccagacacagtggctcattcctgtaatcctagtgcttcgtgtggctgaggtaggaggattgcttgaggccagtgcttcaagaccagcttgggcaacataccaagtctctacctcagctgagtacggtgccttacacctgtaatcccagcatatttgagaggtctgggccgggggattgcttgagcccaggagttcaagaccagcctgggcaatggggcaaaaccctgtctgtacaaaaaaatacaaaaattagctgggcctggtggtgcatgcctgtggtcccagctaccaggaggctgaggtgggaggattgcttgagcccaagaagttgaggctgtagtgagccaaaattgtgcctctgcttttcagtctaggcaacagggtgaggtcctatctcaaacaaacaaacaaacaaaaatcgtctctacaaaacaataaaaacaaattagccaggtgtggttgtacgtccttgtagtcttagttatttgggaggctgaggtgggagagtgcttgagccctggagtttgaggctacactgagctatgatttttgcccctgtactccagcctgggcaacagagtgagaccctgtctcttaaaaaaaaaaaaaaaaaaacaaagaaattggggcaaataacaaatagatgaagcaagttgcttaagacataacagcgtggatctcagacacaaacacatcatttgactgcatttggatatggatccattgcatatttttaagattttggtgataattctttgtcttaactttattctgagttttttgtagaatgatgtgagatctacacagtataccaatgcagattcaccttgaataccacttaacaggggttctgactctgcttcacctactttacatggcatgagcccaaatatagcatatttgcagaagtaaatgaactttatgtctaccacagaatgtaaatttttttctttttatcacctatgaatctgacttaaccaagatatatagcccattttcccaaccgagttaaatttgtactgtacatatttcctagttaagctcgaccttgtaaagataggctgttacagctaaattacaatgtttatctttaccagatgatggactgggcctagtatttgcattctgtggattcggtaaacattaaataagtatcagatacccattgtgatttgctgtgctgggtgctcagcataaaaagttggtaaaatacagagcatgccctcaaagctcagttttgtgaggggactgtggaacatccttggaagcatcagaaaaggcttcttagagaaagtgttgattgaaatgagtctcagttgatttcactgtgctgcaaagtctggaagggctttccaggcagagacaacatgtgcaaaggcagagaaagaggcttctgagagtatgacatcataaagggagtaatttgatgtggctggaccatattttaagtggagaacagaggaatgagagagacaggataaggctggaaggaagatggataagaaccacaaattgaaggatattgttattactgtagtttaaaaatagtctgaaatggtgaacctgatggtttttaatagagcagaattaggattagttgtatggtttggtctatagttgggtttataaaaattttcattttatgagttacacattttacttttttcttcatagactaagaagtatagctacaatcatgaacaaaatatacttgttagtcacacgtagataatcagaagatgactcatatactttgagttcaacattttagctagcagatttaaaaaataactaatttaaccaacctagatttttacttcattgttagcaactggatacctaactttgggtaaatgactttaacttttatctcacaaacgtatggaatattgcctttcagagcctttgctagtcactacaagatcaggatgaattatttgtggtttctgttctctaagaaattgtatcctagtagaggtagtcctcttttcttttctttttttgtctttttgaaagatggagttttactcttgttgcccaggctggagtgcaatggcacgatctcagctcactgcaacctccgcctgccaggttgaagcaattctcctgcctcagcctcctgagtagctgggattacaggtgcatgccaccacacccggctaattttttgtatttttagtagagatgggatttcaccatgttggccaggctgttcttgaactcctgacctcaggtgatctgcccacctcggcttcccaaagtgttgggattacaggcgtgagccatcgcccctggcaggtagtcctttttctcttgtataacattggggatgttaatacttgtctaaatggatacttgtcaacaatcaaagggtttttgaggaaggctctagtgtatttagaaattaactcccaggaatataaatcacctaccagtgtttttttcagtctaaatttgatgagaattggccggacgcggtggctcatgcctgtaatgccagcactttgggaggccgaggctggtggattgcttgaggtcaggagttggagactagccatggtgaaaccccgtctctgctaaaaatagaaaaattagctgggtttggtggtgcgcgcctgtacttccagctactcgggaggctgaggcaacgagagtcacttgagcttgggcggtctcttggttcttgcagtgagccaagatcatgccactgcactccagcctgggtgaccaaatgagactctgtctcaaaaaaataaaaacaaataaaaataaaaataaatgtgatgagaatcatacaagataaaatatagaaaaatatacaaactataattctttaagggtaattattttgagcatcatgtcttatgcttaaaatgctgatttcattttattttttcaggcaaacaacatgggtgttggagtggttggaattatagagtgtaatttccttaagccaactcataataaacaagatttcgactatactaatgagtacaggtatgttacctatttaaattattgactgaggttcctaggaaatgtattaccaagaaagcaggaactactctattttctgtgaatctcagaaataccttattagtaaagaaaggtttgaatatactacttgtgatggtgtaggttacaattcctagaatggaagatggttatattagttttctatgtaagtcccttacctacccattttcttaaagttcgataatgtaattataattttgtaattaaaataaaaatccacaaggtggcaaaacatttagcttaagagaagttatgcaagtattttgaaaataaactttaaaaagaagtcaataatttaaataggtaaatagagggcctggccaatgctggcctatagacgtggtctctggttgacatagggtgtgtggataggttggagctggtctgtagagggagccttatgttgttggagctagcagaagactgctggtgggcaaagcatggcctgatgggcacagctgaagctcctctgggaggtcactgggccctagcaaaatagtaacagagtaccagaacttgggctggatttggagcctagagacaataaattggtaactgaatgaatcaaaaaagtcagccaggtgcagtggctctttcctgtaatcttagcactaagggggcccaaaggtggacaaattgcttgagctcagaaggttgagaccagcgtgggcaacatggcaaaatcctgtctctaccaaaaatacaaaaaattagcaaggtgtggtggcatgtgtctgtggtcccagctactcaggaggctgaggcaggaggatcatttgagcctgggaaggtggagtgtgcagtgagccaagatggcgccactgtactccaacccgatgacagagtgagatcccgtctcaggaaaaaaaagaccacgtacagtggcttacacctgtaatcccagcactttagtaggcggaggatcgcttgagccgaggagtttgagaccagcctgggcaacacagtgggagcttatctctacagaaaataaaaaaatgaggtgggaggatcacttgagctcaggagattgaggctgcaatgagccgtgattgtgtcactgcattcccgcgctggtgacagaagacaccctgcctcaaaaaaaaaaaaaaaaaaaatttcggttctttggtaggactaataaagtctataagcatttgtcaagactgattaaggaaaaggagtagaaaatacaaatcatcaatattagaaatgaaaaagaagaaattactacagagcctccagacatgaaacattaagcagatagcacaaataaattttctccattttagatgacgtggacacattcctttgaaattgaatcactttttagaaaacttcccacatactaaattcagacatttaaggaagaagtggcatcagtctttttatttacaaaaactatttaaaacaatacataatagttcatttgtatggaatacatgtgatattttgatacaagcatacaacatgtaatgatcaagtcagggttattgggatattcatcacctcaagcagttgccttattttgtgttaggaacattccaattttactcttctagttactttgaaatatatatataagatgttattgttaactacggttgtcctccttttttttttttttttttttttttttgagactgagtctcactctgtcactaggctggagtgcagtggcccccaggtcttagcttattgcaacctctgcctctgggattcaagtgattctcctgcctcagcctcccgagtagctgggactacaggcatgcaccaccatgcccagctaattttctgtatttttggtagagatggggtttactattttgatcaggatggtcttgatctgttgaccttgtgatccacccgccttggcctcccaaaatggtgggattatgggtgtgagccaccacgcccggccctgttgtcctattgtggtaccaaatactgtatcttattccttctaattaactgtatttttatactcattagccagcccctctttatttccctctccccactacctgtcccatgtcctgagggcagtattttttagctctcagatatggatgagaacatgagatatttgtctttctatacctgacttacttcacttaatgtaatgtcctccaggtatatccatttatatccatgtcattacaaatgacagcatttttgtggttggataatatcccattgtgtgtatgtaccatagtttttttattcatttattcgttaatggatgctgacaaggatgtggagaaaggggaaccctcgtacactattagtgggaaagtaaattagtatagttgctatggagaataggatggagtttcctcaagtaaactaataatagaattaccatatgattgaacaatcacatggctggatatatatctaaaagaaagaaaatcagtatatttgaagagatacctgcactctcatgtttattgcagcactgttcacagtagtcaaaggttttatgaagccacatagccttgttagtaagctcaagagtacaggaaaggaaatttatgtcagtctcttatcatagaattaaaagtcttaattaaaatattggtaaataccatccagtacatgctaaaagaataataacattaaaaccaagtgggttgtgttctaagacaatatgggtggttttaatgtaagaaatgagtatagttcatcatattgatgtttaataagagaaagcccttatggtcatatacatagatagagaaaaagcacttgcaattatttttaaaaggaacacctacaaaaactgtgaatcaaagggcataataacagagtatttacacacacacggcaagctacattactaatggggaacaattgatagctttccttagaagggtgggagagttaaggataccagccattcactaaatattcttgaggaaataactaatgtaataaggccaaaaaaaaggggtgggggggggcaggttgaaaaggaagacataaagctctattacaggttgagtatccttatctgaaatctttgagaccggaagtgttttggtttggatttttttgtattttggaatgtttgcattatgcctactggttgagcattgcaaatctgaaaatctgaaatccaaggtactttcatgagcatttcctttgggtatcatgttggcactcaaaaagtttcagatttggagcaatttggatttttggatttgggatgttcagcttgtaccagtagttgacaatgttaagtaccattaacccttgaacagcgcagttattagggggactgactacccctcagtcaaagatccacgtataactcctcagaaccttaagagcctgctgttgaatggaagccttactgataacataaatagttgattaagctgggaatggtggcacacatctgtagtcccagctactcaggatgctcgaggcagaatgatcatgtgagcctaggagtttgaagctgcagtgagctgtgatagtgccactgctttccagccagggtgacagagcaagaccttttctctaaaaaaaaaaaaaaagaaaaccatctattaacatgtatttcatatgttaaatatatactgtattcttaaaataagctaatgaaaaaatgttattagaaaatcataggccgggcatggtggctcacgcctgtaatcccagcactttaggaggccgaggtgggcggatcacgaggtcaggagatcgagaccatcctggctaacatggtgaaacccagtctctactaaaaatacaaaaattagctgggcttggtggcgtgtggctgtaatcccagctactcaggaggcagaggcaggagaattgcttgaaccagggagtcggaggttgcagtgagctgagattgagccactacattccagtttggtgacagagagagactctgtctcaaaaaaaaaaaaaaaaaaaaaaaaatcatggccgggtgccgtggctcaggccggtgcggtggctcacacctgtaatcccagccctttggaaagcactgaatcctagccactagaccaccagggaaccacaatcccagcactttgggaggctgatgtgggtagatcacttgagattaggagttcgagaccagcctggctaacatggtgaaaccccatctctactattttatttatttttttctgagatggagtcttgctctgtcatccagtctggagtgcagtggtgcaatctcagctcattgcaacctccgcctcctgggttcaagcaattctccctatctcagcctcccaagtagctgggattacaggcacctgccaccaagcccggctaatttttgtattttttttttttttttttttttagtaaagacagagttttgccacgttggccagggtggtctctaactcctgacctcaggtgatccggccacctcggcctcccaaagtgctgggattacaggtgtgagccaccactcctggtcccatctctactaaaaataaaaaaattagccgggcatggtggtgggcacttgtaatcccagctactttggagactgaggcaggagaaacacttgaacccaggaggtggaggttgcagtgagcctaagtcacgccattgcaccctagactgggtgacagagtgagaccctgtctcaaaaaaaaagaagaaaaccaaaaacaaaatcataaggaagagaaaatatatgtactgttcattaagtggaagtggttcatatgtcttcatcctcgtagtcttcgtgttgagtaggctgaggaagaagggggattggttttgccatggcacgagaagaggtggaaggagaggcaggcacactcagtttaatttttatacactgtaatttctgtctgacttatttccatttttgttttctttctttctttctttcttttttttttttttttttgagatggagtctcgctctgttgcccacatcttggctcactgcaacctccgcctcccaggttcaagcgattcttctgcctcagcctcctgagtagttaggactacaggcacacgccatcacgcccggctaatttttgtgtgtttagtagagatggggtttccccatattggccaggctggtcttgaactcctgaccttgtgatccgcccgcctctgtcttccaaagtgctgggattacaggcgtgagccaccgtgcccagtgcatttttattttcataaaaatatctctgtacagtaccaatccttcttacactgtctgcttcagtttcagtgcctgtatcatagaagtgtccatgttgtaaaagaaatcaaaagcagtcttgaataattggaacccaccttctggattgtctaatgtcagtttgttgtctgggcactgcttcttctgtcttcttcctcactgtctaacactggttcagaaacactcatctccatcaagtaggcttcagttgatttcctcaggtgtggtgtctgttcgctcttgaattcctgcaacatccatatcttgaaactttttgccctctaccttttttttcctgtatatccacaatctctctgatgatttcctcaactggctatcttgtaaatactgtgaagtcatgcacaacatgtggacatagcaggaatttattgttttgagcttgatttctttcacagctttttctgtacttaataatggcatcgttattctagactttcatgatgttttctctgtcagaattgtcttccacagcgttaacaatcttttccgtagatttgctgtgtgtaatgagccttaaaggtcttatgaccctccttgttatctagaggctgaattagagacattgtgtttcgggacaagtagaccacttggatgcctttggtattgaagtcatggggttatgggtggccagggtaccttgtccaatatcaaaagaactgtaaaaggcagtcctttactggcaagttaattcctgacttcaggaacaaagcatcaatagacccagtcagaaaaagaatttctcatccaggccttctatttgtgcaaccaaaagactggcagctggtgtttgtcttttctcttcaaggcttaagggttagcatctttatagataatggcagtcctgatcataaacctgactacatttgcacaaagcagtagggttagcctgtccgttcttggacttaaatcctggtttatgctcctcttttttgctaataagtgttctttgtggcattttttcccagaatagagtacttttgtttgcattaaaaacctgttcaaacaggctgggcatggtggctcatccctgtaatcccagcactttgggaggctgagacaagaatagcttgaggccaggagttcgagagcagcctgggcaaaaaagcaataccctgtctctacaaaaaatgaaaaaaaaaaaaaattagccaggtgtggtggcaagtgcctgtggccccagctactcaggcgcctcaacctacatatcaagcaatttatactttttcttatattatgactttgcttcttgggaaaacaactggcatcactagtggcagttcgtgtgggtcctgtggtgtttttcaaggtttacagtattgcactaaacgatttttactgcaatataaaatttcttggagatgcttacatggagataagcatgtcataaggcacttgaagcaaataaaaaacttgagcccatcaaaatagcaacaggaggtggctatgaaattactataataatattgtatgtatataattaatcttatgcagttataatttaagactgcatctttgtttacatttctcttgactgcaaatgaaaccacctacagtctgtatatgcttcagtcttgataaattttaactttttaaatagctttgtgtatattttatggtagtaaattataaaatagactagtatttgcatgttttatgcattcatgacatatctaacttattcttaattttttggatatttctgggcaatgcagttcttggaagtttttttcaaattgttataactctctaaaaaattttctaatttattgaaagaaaattgtgtataagtgcagttcaaacctgtgttgttcaagggtcacctataccttgaatgttctttattaactatatgttttggagttttttctcttcacagtgtctatgtactcattactagattatttatgatttatgtttgaaaagaattttttcttgattttatgatttactttttaagacttacaataacagcactaggagaaaagctgaatgattactggaatgaaatgaaagtgaagaaaaatacagaatatcctctaaatttgccagttgaagatatacagtaagtacatttttaaaacatatcatttcacttagatatcaagatgtggtattagagagtaaagggattgtacaatgtttcacaaacttaggactgtaactcataggaataaattctgcaacatgaattagcgcactgcaaaatcagtgaatagaatgtaaacctgtatacatgcacacaaaacatccataaaacaatgtttacccatatgtgatgcatgttaatgttatttcattttaagatgctatggatggattatataatagtttgaaaaacactggtatagtgtatcattaggatgatggggctgaaacccaacttgagttcatattctcattctgcttaagtagccatgtggcattgaacatattacttggcctcttgtaagcctccattttcttgtgtataaaatgggaacattaagagcatttgcctcctcgaattatatgaattaaataatatgcctgacagtcacttagtaacacatcacaggataacagtcctataaatgaatgaatgaacaatatctgtgtgttctttatctgtgtgttctttatacattattatacataatttatacattatacatattattcataatttatacattattacaaagataaccaagatatataatgaaaaacaagaaagatgcagctcagtgtatagacttcccatcgtacttttcaatttttttatatttaaaaaaagttttatacaggtggggtctccctgtgttgcccaggctggtctcaatgtcctgggtccaggtgatcctcccacccaaagtgctgggattataggcatgagccaccgtgcccagcttgtatttttttaatgtgtcagtatacacatgcatactttataagcatagaaaatttctgctagtattttaaaaattagcagtggtaatttcctgagacaaggagtttataaagtataaagttatgctttataaacctctagattgttttgaagtttcggatttgtttggttggttggttgggtttttttttttttggttttttttttttgaaatggagtctcactctgtcacccaggctgaagtgcagtggcgcaatctcagctcactgcaacctccacctcccgggttcaagcaattctcctgcctcagccttccgaggagctgggactacaggcgtgtgccaccacgcctggctaatgtttgtatttttagtagagacagagtttcaccatgttggccaggctggtcttgaactcctgacctcaggtgatctgcctgccttggcctcccaaagtgctgggattacaggcgtgagccaccgcgctcatcctgttttgaagttgtttataaatatctaaatgctttttcaaagctagatttaaaaagcaggccaggtacgttggatcacatctgtaatcccagcactttgggaggccaaccgaggcgggcggatcacttgaggtctggagtttgagacccacctgatcaacatggtaaaaccctgtctctactgaaaatacaaaaagtagccaggcatagtggtgcacacctgtagtcccagctacttgggaggctgaggcaggagaatagcttgaacccgggaggcagaggttgcaatgaaccgagattgcaccattgcactccagcctgggcgaaaagagtgaaactctgtctcaaaaaaaataaataaaatgaaataaaactagatttaaaaagctattgacattaaggtgaagttttcatatgtaaaataagtctacataggctgtatccagtgggtcacgcctgtaatccctgcactttgggaggccaaggcagaaggattgcttgaactcaggagttggagaccaggctgggcaacgtggtgagacctatctcttaaaaaaataaataaataaagtagaagcaaaaaataattaaaaaaataaaagaatatatacaagttctttacaggaattattgtgatttttcttttttttttgtttttgaggtagaggcttgctctgtcgcccaggctggagtgcagtggcgcaatctcggctcactgcaagctctgcctcctgggttcatacaattctcctgcctcagcctcctgaatagctgggactacaggaacccgccatcacgcatggcttattttttgtatttttagtagagatggggtttcaccgtgttagccagggtagtctcgatctcctgacctcatgatccacccgcgtcagcctcccaaagtgctgggattacaggcatgagccaccgcgcccagccttgatttttaaatgagaaaaatatgaaagcattttgtaaactaaaagtatactaattttagttattcagaaataagagggcaaaagtgtcttatttaaagttacttaaattataacaacagaattctgttttctggacttgagtgatttattatgctaataaatacaatatattgtagatttaacattgtagacactaaacataaagttcagggcaaggcatttgaaatattaagttatagaaaaaatttaatgctattaagacataagtcacattgttcaaattggcttgtgacttttaatcttttgaaggtaaccaaaatggttgtgtttaatttttgagagatggggtctcactatgttgcccaggctggcctcatactcctgtgctcaagcgattctccaacctcagcctcctgagtatctgagactaaggtgtatgccaccacacccagctcaaaatagttgtttttaaaatgtatttctaaaaaatacctgctttagcctcccaaattataggcatgagctaccgtgccttgccttgccttttctcttttcttttcctttcctttcctctcctttttttttttttttttttttttttgacaggatcttactctgtagcctaggctggaggtcagtagcatgattttgcaacctctgcctcctgggctcaagcaatcctcccacctcagcctcccaagtagcagggaccacaggtgtgcattaccactcccagttaatctttgtgtttttttgtagagacagggtttcaccatgttgtccaggctggtctctaactcctgggattataggcatgagccgtcgcacccagcctaattttgaaagagttacgtcataatttttaggaaaggaattaaataatggcatcttgtggtagaaatgatgtggaacatctgatgaagtatttagagtccatatttctgtgttaatattttgttcttgttttgggacaggaagcgtcctgatcagacatgggttcagtgtgatgcctgtctaaagtggcggaaattacctgatgggatggatcaacttcctgaaaaatggtattgctccaataaccctgacccacagttcaggtaccatagagttggtagtaccctttttggaaagacggaaagtactgttcacagtgtatgaataggcgctggtgacatgttattcctatgtgatttttctgaatagaaattgtgaggttccagaagaacctgaagatgaggatttggtacatcccacttatgaaaaaacctacaaaaagacgtgagtgttgtattgatgtatagtgggtaataatgcccagatcatgaacagtgatgccttggcaacattatttgatgcttctccaaggtaaagcacctgtaactgaaaaagtttataatgtggagtgcgtaatatcaagggctttaaaaacaaaaacttatgctgtggatacctgctgtttatttcatgcttattgctgccatatgtgcggatgttttgtgtaagagcagtctgctgttgtgagctgtatgcagaggaatcattagtgaataccccccccattgaagcttatagagaaggtgtaacagaagaggtgatacatgaattttaccagttacgtgttggtgagtgccatagaagctctggtccagtgctgtaaggaagctcatagggagagtagttctgtctggtgggcaggagagcagaaatagatcaggaaacttcatgaaggaggtcatttttgtaataggccttgaaggatgggtacgatgagaatgtacagggaataaacatttactcagtgtagctagagtatgtgaatgggaataatggaaaatggatgtggcactttgggaggttgaggcgggtggatcacctgaggtcaggagttcgagaccagcttggcaaacgtggtgaaaccccgtctccactaaaaatacaaaaagtagccgggtgtggtggcaggtgcctgtaatcccagctactcgggaggctgaggcaggagaatcgtttgaacctggagggcagaggttgcagtgagccaagatcgcatcactgcactccagcttgggcaacaagagtgagactctatcttaaaaaaaaaaaaaaagatagtggaagtgggacagatgctgaataaggatagtcagccagtggagacttcaggctaatctaccacacacagaaggccaggttactaagagcctttcaggtggctttgatttgtagtgtactattctttagtgaaatccagcaatagtattggaagtatagaaacctatgtgggctggtgtggtggctcacacctgtaaccccagcactttgggagactgaggtgggtggatcacttgaggtcaggagtttgataccagcctggccaacatagtgacaccccgtctctactaaaaatacaaaaattagctgggtgtggtggtgcatgctgtaatcccagctactcaggaggctgaggcaggagaatcacttgcacccaggaggcagagattgtagtgagccgagcacaccactgcattccagcctgggcgacagagtgagactctgtctcaaaaaaaaaaaaaaaaaaaaaaaaaaaaggcaggtgtggtggctcacatctgtaatcccagacaggccaggagtggtggctcacacctataattctagcactttgggaggctgagttgggcggatcacctgaggtcaggagttcgagaccagcctggccaatgtggtgaaaccctgtctctacaaaaaacacaaaaattagccgggcatggtggtggacgcctgtaatcccagctactcgggaggctgaggcaggagaattgcttgaacccgggaggcagaggttgcagtgagccgagattacatcactgcactccatcctgggcaagactccctctcaaaagaaaaaacctatgtgatgttctagttcaaaagcctgtgattctggactgagttatctggtcttagtggagaaaaaaacaccaaagatctgcagtttataccggtgaggatggaaaaattcaggctaaaattagggtgctactgagataaaaggtagaaagtatttcctgaagggcttactgttgattatattgaaatagaagcagagttcagagtaccttagtaactgcataaatggcaggtatgtcattgggaaatgggattgagaaataacaacatgtttttcatctttattttaaagcaacaaggaaaaattcaggatcagacaaccggaaatgatccctcgggtaattaagccttcttttttttttttttttttaaatagagatgggggctgacacccgtaatcccagcattttgggaggccgaggcaggtggatcacctgaggtcaggagttcaagaccagcctggccaacatggtgaaaccctgtctctactaaaaacacaaaaattagctggatgtggtggcacatacctgtaatcccagctactcgggaggctgaaacaggagaattgcttgaacctgggaggtagctgttgcagtgagaaagattggtaccattgcactgcggtctgggccacagagcgagacttccatctcaaaaaataaataaaatagggatggggtctcactgtgttgaccaggctggtcttgaactcctggcctcaagtaatcctcccatctcagcctcccaaagtgctaggattacaggtatgagccaccacacctgtccaagctttccattttatagctgtgtcttatattgtgtagtgcttagtttaatcagtagtgaatgttaaagtttaatacatatcaaagggatttggtttatttagttcattttcttctcttgtacttctgcttgcccacctttccaactcttcctaatccaacatcattcaaactgttagtttgattgtttagttgggtatcttctgaggaaaggcaaacaaactttaaaaattgtactgttagataagcagttaaggaagacatcccaggaacacccaggaagccatattttagtgctaaccgggacaaaagccatagtgtttttcccagtgttgactactctgcctggcctctctcttctgtcttaatacttactgtgttaaagagctttggttgagtatagattctcctaggcttaccgtagagttacatcctgataagcccattataagttgaaaatgtttttagccgtggtggctcatgcctgtgttcccagaactttgggaaggtgaggtgggcgatcacttgaggccaggagttcgagaccagcctgggcaatatggcaaaaccctgtctctactaaaaatataaaaaataatgtggtggcaggcacttgtaattccagctactcaggaggctgaggcacaagaattgcttaaacctgggagatggaggttgcagtgagccaagatcacaccactgcactccatcctggggaacagactgagactctgtctcaaaaaaacaaaaaacaaacaaaatattgttatcaaaaatgcatttaatacacttaacctattgaatatcatagcttcgcctagcctaccttaattgtgctcagaactcttatattagcctacattgggcagtcatctgacagtctgttttatcataaagtgttgagtatctcatgaactttattgaatactgaaagtgaaaaacaaaacaaaaatgattgcttgagtactcgaagtacagtttctgctgaatgggtattgcttttgcaccatcataaagttgatgccattgtaaatcaggggccatctgaatgcaagtaggcagttgtgcttcttgcttgagaagtttgggtcttgataagtctagtagcaaagaggtcaccacatggtaaatctttttggctttgtgggccacataaagtctctgttgcatattctttgttttgttgctttgtttcttcacaccttttaaaaatacaaagccattcttagcctacttgcaggctggatttagttcattggtttacttgttgattcctggtatagcacaaggaatttacatgtttggaattgtttttgtgtcttctgggataagggggaagaggaagattatatcttgtgttttgggcatgtcacactagaaatagttcctttaaggtgatgatttttccctccaacagattaatgctgaactgttgtttcggccaactgctctttcaactccaagcttttcttctcctaaggaaagtgttccaagaagacatctttcagaaggaacaaattcttatgcgacaagacttctaaataatcatcaagttccacctcagtctgaacctgagagcaacaggtcagtggctaagattggttttccatttggggaatattaaacagagcttttacttgacacttctgtgacagtgatgcaattcgggatcattgtaggttccattgtgaattgtaggttccatgaatgtgaaaatcttcaggacaaattgtcttgcttttattgtctaaacttaggctaaaccctacttctgccacctgttaaattcgttaaaaagtattaattgaccagcctggccaacatggcaaaaccccatctctactacaaatacaaaaaaattaaccaggcgtggtggcgggcacctgtaatcccagctactccagaggcggaggctgaggctgaggctgaggctgcaccccagcctgggcaacaagagcaaaactccgtctcaaaaaaaaaaagcattaattgtattcattgtagagtttgatcgcattctcacctgtttgaatttctatatagtatgacaattcctgcttttaagatgatcaggacttaaaaaaatgtgaagcagcccgggcgcggtggttcacgcctgtaatcccagcactttgggaggccgaggtgggtggatcatttgaggtcaggagttcgagaccagcctggccaacatggtgaaaccccgtctctactaaaaatataaaaattaggtgggtgtggcgttacatgcctgtaatcccagctacttgggaggctgaggcaagagaatcgcttgaacctgggaggcggaggttgcagtgagccgagatcacgccactgcactccagcctgggtgacagagcgagactccatctcaaaaaaaaaaaaaaaaaaacatgaagcaattaacagtacgacactatagtgacccagaagttctttgcaaagcctatggcacactgtaggcacttaatttattggaggagtggatggagaaggaagggacaaagagaaagtgatgcatgaattgaatagttagccatcttgactggattgatcagcgaaggctttgtgatgaggtggtacttacgttggttcctgaagttctgaaaacagtagtcttgtagatggcctcttccaatttaatagaatgaagacaagtgaagaagaatgaatgtgatgtctacaaacgagtggatcacactgactatactgatgtttgttattcgaagaggaacattgaaacaagcttctctaagatagtggggccagattttttttgagatgttttgtaacttttatcaaattctcaaaggaatttttgaccccaaggaagattataaataactaactgcctttatgcatatataaatcaaagagggcatattctagaatagtttgctcttcctttctttatttttttgagtcggagtttggcttttgttgcccaagctggagtgcaatggtgcaatctcaactcaatgcaacctccgactcctggttcatgcgattcccccacctcagcgtcccgagtagctggggttacaggcacgcaccaccatgcctggctaattttttgtatttttagtagagacaggttttcactgtgttagccaggatagtctcgaactcctgacctcaggtgatccgcccgcctcggcctcccaaagtaatgggattacaggtgtgagccacagcacccggccagtttgctctttataacctgtgtattggacactcattttggagctggattgctactttattaagaactcatattttacagttctccttaacatttttggcttttctttgtaaggatggttttgtagtttatagataagagattaaaggtatttttaatgattttaacttttagattcagggtacatgcaggtttgttacatgggtatatggcgtgatcctgaggtttggggtatgaatgataccatcgcccagctattgagcatagtacccaatatgtagtttttcagccctgcccacctcccttcctctctccccactgtagtggtccccagtgtctatagttcccatctttatgtccatgtgtacctagcacttactcccacttataagtgagaacatgaagtatttggttttctgttcctgccttaattcccttaggataaaggcctccagctgcattcatgttgttgcaaaggacattatttctttcttttttatggctgcaaagaaaattttttaaaagttggccgtcatcaaaatggaagacaagaataaagagggaaatttttgattaaacaactttttttttttttgaaacagagtctttctctgtcacccagcctggagtgcagtggcataatctgtttactgcaacctctgcctcctggttcaaacaactcccctgcctcagcctcctgagtagctgagattacaaatgtacaccgccatgccctgctaatttattgtgttgtagtatagatgggggttcaccatattgcccaggctggtctcaaactcctaagctcaggcaatctgcctgcctcggcctcccaaagtgctgggattacaggcgtgagccactttgcccggcctattaaacagtttttaaagccgtattctcaaatttataaaccaaagtttgtggaaagggtgtatctaagtcttaggaaatataaataggaatgagcttggtaagaaaaagaatagagtaactccaaattaaacagggcagagtaagcaagaagtacttgatacagcaaaccaagggaagctgaaacctaagctgctggaggatggtagaaaccagtttacgccacaggtccctagaaagtctcctaacttggaagcattggggactgctgaaggtggaagatagataggggtgagaaccagaggcttggttggaaacttaaagtcgagacctctttccaacctgcaaagtctggtgagtgccctttctctgcctctgtcagaagatagggaatttactttatggagcagtttttactgctgaagatgtacatgagccattgttttgaaacagaatgagtaagggaaagtttggatactgaatggtcagaaatccacccttccctcctcactgggctccaagagagaagccctaaatgatgatggcagtttgagcaccctttgaatcacaagctcagccctaactactgctagtcagtttcactcttaggtatacgcagatcgccctggatagccacatgtgtcatctcccacatgggacagcagactgaaacaaagggaatagaagaaaacattgtgaaatttattgggggaaagtgatgtaaacttgaataaataaatcatttagaatgaaaagcttaacagtcggaagatagagaaagaagaaaagatacagtatctgtgctggaaagccaccatctgaataagggagtttcagaatgggacgtaggcactggtatggtgtagcaaacatagctgccttccagaatgggaaatcataccagaaaaactgcatttccactaactacagagcataatgtctggaaggagagccactcaaagacataggatcatgacatttttttaacgcagggaataaaagattttttcagaaagaaacagattatgtacgggcaagagatgaggaattagaatggcagaaacacttgaatggcagatgaaaatggaatgatgcttttaaatttctgagaaaataatttttcaacccggaagcctatataacagttaagctagcaatagacttgagagagaaataaagatgttttcatcatgcaaaactttgcgtttgttatgttctgtgtacccttcattaagatgctgttgcaggctgtgctcgcccaatatgagacagtccaaaaaagaggaaaatccttcctgagatctaggaggtctaacacaaggcccaaatagcaaaccagtacaaatattcctccaagtgtggaaaaaggcaatcaaatggtgataaataaatgtgaactatgcacatattaacatgaatgaacagggaatgatgcaaatgaagaaattggggcaattttaattcagataaaattatttcatatgaaaggataaatactggtttgctttatggcttatctttgatcactgattactgataaaaattattatgggcaaatgaaaatggtggtgccattccctgagctgaagaatacaaagaaggggccggggtgggtagcattctgttctggaaatgtgtacattgaaatgcctggaggtgatcaaatgcagagatgtttggcagtaaatagatctggtacttcaaagagatctcaatagtccatcgtcttcatctgtaaaaagagaaaataatctctacttcattaaatcagtgattggtactatacaatgcgtcactttaaaaaatgagcctgggtatttcttagtattgcaaaacttatagctgggcacagtggctcatgtgtctaatcccagcactttgggaggctgtggcaggcagattgcttgagctcaaggagtttgagaccagcctgggcaacatggggaaaccccatctgtactaaaaatataaaaattagctggacgtggtggcgggtgcctgtaatcccagctcctcaggaggctgaggcaggagaatcacttgaacctgggaggcagaggttgcagtgagccaagactgtgccattgcactctagcctgggcgacagagtgacactccatctcaaaaaacaaaaaaactgttacaatactgcatttgttagaatgattacttcaaggtcatctattttgtccatattttataatcttatgttttatgtataaaatttttttcagcttgaaacggagactttctactcgttcctcaattttgaatgcaaagaatcggagattgagtagtcagtttgaaaattcagtttataaaggtgatgatgatgatgaagatgtcatcatcttagaagaaaacagtacccccaaacctgcagtagatcatgatattgacatgaaatcagaacagagtcacgttgagcaaggtggtgttcaggttgagtttgtgggtgacagtgaaccttgtggccagactggttcaacaagcacctcatcatcccgatgcgaccagggaaatactgcagctacccagactgaagtaccaagtttagttgttaaaaaagaagaaactgttgaagacgagatagacgtaagaaatgatgcagtgattctgccctcctgtgtagaagctgaagcaaagatacatgaaacccaggaaaccaccgataaatctgcagatgatgcaggctgccaattacaagaactgagaaaccagctactccttgtcactgaggaaaaagagaattataaaagacagtgtcatatgtttactgatcaaatcaaagtgttacaacagaggatactagaaatgaatgacaagtatgttaagaaagaaacttgccatcagtccactgaaaccgatgctgtatttttacttgaaagtattaatggcaaatctgaaagtccagaccatatggtatctcagtatcagcaagctttggaagaaatagaaaggctgaaaaaacaatgtagtgctttgcaacatgtaaaggctgaatgcagccagtgttccaataatgagagtaaaagtgaaatggatgagatggctgtgcagcttgacgatgtgtttagacaactggacaaatgcagtattgagagggaccagtataaaagtgaggtgagttatatcatccaacatgtagtcatggagtccagggccatttaaaccttaagaagctgccagttggctgggcgcggtggctcatacctgtaatcccaccacttggggaggccaaggcgggtgggtcagtcacttgaggtcaaggagttcgagaccagcctggacaaaatggtgaaaccccgtttctactaaaaatacaaaaattagcctagcgtggtggtgggaggctgaggcaggagaatcacttgaacccaggaggcggaggctgccgtgagccaagattgcaccaccacattccagcctgggcaacagagcgagactctgtctcaaaaaaaagctgccaattgcttgattggaatgctttcacttaaaaataattctgttcttattgagtgtctgttattctactggttctcaactgaggagagggcctcctggaggcatatggaattgtgtaggggcatttttggttcttccaatgtcttgagatgtgcattcctgaaaaatattaggggtagccaggtatggtaaatgtcctgttcagaataccaatattaacttaatacctcattaatacagttaattatgttcttttttgggcatcaattctgcttttaagtatagttaatcctttagttatggagtcattcatttttctagattatgtctttcaagattcctgagagaaactgacttatcccttttaaaatctttgattaatatacatacatacatatatatatatatatatatatatatattttttttttttttttttttttttttttttttcttcttcttcttgagacagaatttcgctctgttgcccaggctggagtgagtgcagtggcccaatctcggctcactgcaacctccacctcccgagttcaagcgattctcctgcctcagcgtcccgagtagctgagattacagcacatgccaccatgcccggctaatttttgtctttttattagagacagggtttcaccacattggccaggctgatctcaaactcctgacatcaagtgatccacccatcttggcctcccaaagtgttggaattacaggcgtgagcccccatgcctggcctgagttgcttgtgttctgactatcagaactgagtcatctggctaaagggtgcctgggaaatgcagtctttatgcatgggttcttctactgagaaagaaggagaaaaacgataaataccaagagacaaatgataaatatcagtagcttcttcatatgcccctacttcaaattcaggtagctccttttaatctattttatacatttttgtgtgtgaggcctttgaaaggattttcctgctaaaaagagtttgggaaccatggtgtggtgctgtgctgtctcttccttgggaatatttgctactcatgcaaacactaatcttgatgtcttggctcaggagttgaatgacaaaatacagatgctcctcaacttatgatggtgtcagtcctgaaaaacccatcataggttggaaacagcattaactccaacattcatttaattacagccaacctcccaaaatcttagcctagcctaacctgccttaaagtgctcagaacacttgtgttagcctacatttgggcaaaatcatctaacacaaagtctggtttattacaacatactgagtatttcatgtaatgtattgaatctgtgctgaaaatgaaaaacagaatgattgtattggtatgcaaagtgtggtttctatagaatgcatataactttcacaccatcataaagctggaaaatcataaagtcaaaccgttgtaagtcagggaccatctgtttataaaaagcataaactcattattgtaacttaattataagctgatgagtatgcaagaaataaaaaccactgtgacattaacataatttaggcattagtatcttggtttttctgttttgttttgttttgtttttttttttttttgagatggaacttcgctcttgttgcccaggctggagtgcaatggcgtgatctcagctcaccgcaacctccacctcctgggttcaagcagttctcctgcctcagcctcccgagtagctgagattacaggcggctgccatcacacccagctaattttgtattttttgtagagatggggtttctccattttggtcaggctggtcttaaactcctgatctcaggtgatctgcccacctcagcctcccaaagtgctgggattataggcgtgagccaccatgcccggctggtttttcattttctaggtaccacttttttttttaaatcaagtggtaatatgttgtattctctcagtgtaaaaagatgtagaagtgaagctgtaaacgaatgaagccttgtttatagaaaactactggtttttctttgtgtatttgttttttgatagttgataatgttatcaagcaggttctctatattagcttgaaatttcactttgccattagtatttttaagttttacagttataaagctcatttatatttttgttaggttgaattgctggaaatggaaaagtcacaaatccgttcacagtgtgaagaactcaaaactgaagtagaacagttaaaatctacaaatcaacagacggcaacagatgtttcaacatcaagtaacattgaggagtctgtaaatcatatggatggagaaaggtaatattaaatgaggcgtttttgtggggctgcaattatggttaggatactatttatttttatctgctagcacccatcaaatagatactgttctgtcaaaagaagttattgatggtctgctgtgaccctggtgttatgatagataaaaaagaagtgacacttcattatccttcctttccagtttctgaccctttaggttctatttaagtggaataggaatttagaagggataaagcatttgattggtcagagtggttttagaatgctttttgaaggaaaataaaaatggacaagatattgaagaatagggggaatttggccatgagtagaagacaggagacttttactgaaactcactccttcaacctgtttttcttttattgtcgtacttggtaccatgtctttatggcttgctgtccttatttcactgtatgctcactctaatcttttaggaaattgcaaaattattaaaaattgccatagtacagatgatattaggaagaagtcctattaaaacaagtagataggccaggcgtggtggctcacacctataattctagcactttgggaggctgagttgggcggatcacctgaggtcaggagttcaagaccagcctggccaacatggtgaaaccctgtctctactaaaagtacaaaaattagccgggcgtggtggcaggcgcctgtagtcccagctactcgggaggctcaggcaggagaatcgcttgaacctaggaggtggaggttgcagtgagccgagattgcgccactgcactccagcctgggtgacagagcaagactctgtcttaaaaccaagcgtggtgcctcatgcttgtaatcccagcactttgggaggccaagatgggtggatcacttgaggtcaggagttcgagaccagcctgaccaacatggtgaaaccccgtctctactaaaaatacaaaattagcttggcatggtggtgcacacctgtaaccccagctacttgggaggctgaggcaggagaatcgcttgaacctgggagaaggaggttgcagtgagccaagatcgcgccatcacgctgtggccttggcaacaagagcaaaactccgtctcaaaaaaaaaaaaagctggtatgggaacgattaaagtattatcaaaggtctagtggactcttaccataaaagctcacaaaaaaacatgctcaaaatcacattctccgcattatcagactaaggaagaacatcttgatcccttcatagatttccactcgagaaaaatcagtatctaaattaaatatggacttattatattgtagtggggtagggaacaagaacaactgtaacactcattttatgtgtttgccataatatttgaagcaaaagctgccttacagtttaggtgtttattgcttaaatacttttgggcattttttaaaaagtctagaatgttgatattcataaacttggaaggcataattatcttaatctatggtttcccagtgttttcagcaaaccattgttctctgtaaatgcacggtaacttaagcatgtaataggatcagagcagtcctacaattattattattattatttttttggagacagagtcttgatctgatgcccaggctggagtacagttgcataatctcggctcactgcaacctctgcctcccaggttcaagcaattctcctgcctcagcctcaccagtagctgggactataggtgtgcgccaccacgcccagctacattttgtatttttagggagagacggggtttcaccatgttgatcaggctggtcttgaactcctgacctcaggcgatctgcccgcctcagcctcccaaagtgctgggattacaggcgtgaacctctgtgcccggcgtaaaaaaaaagctgctttaacattgtttaacacaatgttttgcaagcttatttgaccacagaaccttttattacctcttacacaactatggatatcttatagaacatgttttagataattctggctaagcatggtggttcatgcctgtaatcccagcactctgaggtgggcagaatgcttgattgagcccaggagtttgagaccagcctgggcaatatagtgaaaccccattgctacaaataataataataaaaattaaccgggcatggtggtgtgggcctgtgcttccagctactcaggaggctgaggtgggagaattgcgtgaaccctggagagcagtggtgccatcgcagctcactgcagccttgacctcctgggctcaggtgatcccccacctcaccctcttgagaagctgagactacaggtgtcgtcaccaagcccggctaatattttgtgtttttagtagagtcagggtttcaccatgttggccaggctggtctcgaactcctgggctccagcgatctccctcctcggcttcacaaatgctgggaatacaggcatgggcaagtgcacctgactcataaaagtgaattattaaagtaaattgagttctctaggggaggttttgcttttccttttgtttaattgtatattattctacggagatttgattttgatattttactttttaaggtctacatgaatcttaacttgtaatgctcatctaataagttacatatttgtatttgcagcctcaaactccgatctcttcgagttaacgtaggacaactgctggctatgattgtgcctgatcttgatcttcagcaagtgaattacgatgttgatgtagttgatgagattttaggacaagttgttgaacaaatgagtgaaatcagtagtacttaaagtatatgttatgtaagataaaatatttgctcaattcttttggttgtacagctttcaaaatataattaattttgttttatagatatgataggcaacagactgaaaaccataatctttactgtattctatgcattcaaatgtggtcacaaatattgtggacacattatcttatgttttgaaatacctgtgaattgttggcattgagcagctgaagctaactcatgactctgttttgaatgtaaatatttgtaattaagcctgcacatatttttttattgccctagagtactcaagtgtttttcaccaagagcttttcaggttgcccctaagctttgtgcaattttttctggttccccaaagtgtatttttctctaagtcgagggctatgccataatacaaatggaaatgttacctttgattttcttataaaggagtttaaataggatttttaaataatgtagtaacactcctgatacaactctggttataagtgaattgagcattaatgtttcttttgtataaattcctgtcctgaaatattttattcatgaaaataaggtaagcaaaaaccaactccattttgccaggattttgttgtgctgagattgccaatcacggttaaacacaaagtgtttttatagaatgaagaaacagtctttaacagaaaaaaggtattgaaatattaaatggccaccaagtttactttgaagcccatttttggctgtttagtcagcatgaagtgggcatgataattttttaatatttctttttgtgaaatttcctgtacagccttttgtaggattactacaggttaatgtgagttgaggaagacagtctttctcaaacaatactacataccttttattatattacaaacctaagtgttttatatcctagagtcaaggaacaaatttccttaggattatagtattacatgccataaaatactatgctttattggtcccatgttttgtgcaattttaaagagatggctttctattaagtataaactatgtatatataagaaccatattttccacaactaaaatgtgcattattttttccaaagttttatcattgctatttatttttacctttgtttttgaacattcaatccgttcattttgtatgtatgcttaatacgtgtcggtcatatacagtattgaatttttactgtatagtaattctggaaagagcaaataaatgaagattgtttttatttgcctgataaagtaattgaaagtgtatttttggtatgaagctggttttctgtcacaattgtaatttcccaaattttaaaatatcttataataaaataaaaatatatgatggctaactgttcaaatgctacttttaaagacttaatattaacctcaaattattttaaaactaaaaatgtattcattagaccctcaacttgagctcattttaactactttaattgcagtttattttttgaagactgtttccattaagactgaggctgagctcctctttcctcagagcatgtatattctgttttcaaaagctttttctcagcctggcgcagtggctcacgcctgtaatcccagcactttgggaggccgaggcgggcggatcacctgaggtcgggagttcaagaccagcctgactaacatggagaaatgccgtctctgctaaaaatacaaaattagccgggtgtggtgatgcatgcctgtaatcccagctactcaggaggctgaggcaggagaatcacttgaacctgggaggtggaggttgcagcgagccgagatcacaccattgcactccagcctgggcaacaagagcgaaactccgtctcaaaaaaaaaggacttttctttgtataaatcatttactctagagaaaccttgcctaaataatagcagctatgtaaatcatatgtaagttttgtgaatatctaactcatgcagtggttctttttggaatttgctatttttcccttccttttggccagcttctctatgtattcttgcaaaaatatttcctgtagctgtctggcttgatgggaaaattaatcatgggattagtaagagaaacttgcttgctaaattgattctttggaagcacttagatactttttgctctttatgaagatattgaagtattgccaagatatgagacttcgaaaatgtggctcacagttgcagacagaacaactgttgtttaacagaacaacgtgggctttcatgatgtatgtacctttctctttcttttgttgcatgtgggggacagtattgcttcaactaatgtttattactttaaaacacgaaaggtatgaggaagtaaaccaaaacagtccacagtcttcaaacaggacctagggtggcaaaatcagtgaaagctgagtgagcacacagagcaggagggcatggcacgtccctgtgtgcttcctttgggcctcaaattcttcatgtggcaggtccagttggtgacgctgcctgtgatctcagacgcttgattcttgctgtcacatgagacgtcttaaacttgggtcatacatcattgaggaatcatttaagttctcacctctggctgcgtagtagaattacttggggagttttttaaactcccaaagtcaggctgcacctcacgttaattaagtcagcgtccttggggttagacccagataacagtatttttcaaggcctcccgggttaattccagtgcaccatcagagccaagcactgttgagttgtgtcttctgttgagtatttataaatgttgaacttgagtggttcacgaaacaaacgggatcagcatatccactttctcactggggcaagcagggggagggaggggaagcagagcggtgccccggtagagatgtaaatgaacagtgaaaagactttctccacggcctctaaaggtaaccactattggcttttgtgtgcatacatgcacacattcatgtgtatgtattttatttacattaaattgcgtatatttgtgtcgatatttacacagtgggattataccatataattgataactaaacatttccatatcattctttcaaaaagcttaagtaacatttcatcataggaatatgctcctaatggttacttacttacttacttttcgttagaaagaatatactggctgggcgcagtggctcgtgcctgtaatcccagcactttgggaggccaaggtgggtggatcatgaggtcaggagatcgagaccatcctggccaacatggtaaaaccccatctctactaaaaatacaaaaattagctgggcgtggtggtgggctcctgtaatcccagctacttgggaggctgaggcaggagaatcacttaaccccaggaggcagaggttgcagtgagccgagatcacaccactgcactccagactggtgacagagcgagactccgtctcaaagtatactgtgaagattaatacataccacacatgattttccgattaaatccagagtgtaaattgttaacagtgaatattgataggtcaaagaatgtatgccatgtacatttaaataaatattgccatccaaaaaaaggttgcaggaatttatacttaggatgagtaataaatatgagtgttttcctcaaagtctctcaaacttacttttgctaatttgatatgtgaaaatatgacagctgacatttgtctcagtccttacattggccattttaattttctgtgttttatacatgttctttgcctattcttttccactgtgttcttgtcttcttgctgtaaagaagctgaaagcttgtgttaatttggccacacaccacccaaaaactacccagacacactacccatttcttcctatttcagaaaatccacagtaggttgtctttttttttttttttttttttttttttttgagacagggtttcattctgttgcccaggctagagtgcagtggtgtgatcatggcttactgcagcctcaacctccgaggcccaaatgctccagctgcctcagcctcccgagtagctggcactagaggcgtgcaccaccatgcccagctaatttttctattttttgtagagatggggtttcgccatgtccaggctggtcttaagctcctggactcaagcagtccacccttctgggcctcccaaattgttgggattacaggcatttgagccaccgcgcctgactggttaagtcctattttgtgcagtgtctcataaacagggactcactgaagtggcttgaaaatctaaatagaatcctatctgcatatttgtctgttgaatgttggtcacagctcacaagatgaatgctattaatatctgattggcgtagaggaaaaaataaatctgttgctttttagaattgtctattgatcacagagttaactttcacatactagcctgtaggaagaaagtctggttaagagttaacaagaaaccttttaaagccacaatttcttagagagtcatcaggactcaatgtcttggtaacaagacagaataaatttaaatttgaatataaaggacttttatcccaacctggctaacaatatttaggttatgtatgtgcttgatatgtgaatatctagaatttggctgtagttcgtttttttttttttttttttttttttttttttttttttttgagacaaagtatcattctgttgcccaggctggagtgcagtggcatgatcacagttcactgcagcctcaacctctcaggctcaagtgacctcccacctcagcccccacgagtagtaggaactacaggcacatgccactgcgcccagctaatttttgaatattttgtagagactgggtttgccatgttgcccaggctgctccaacttctggcctaaagccatctgcccgcctcggcctcccaaaatgctgggattacaggcgtgagccatcacgcccagctggctgtatcttcataacaaaatgtaatggtgttttatattcacaaaggagtcaagtcttcctaatctcccatggggttcctgttggaagtgaggctcttggtttgtactgtgatctgaaccatgactgaattaaggtaatttgagtatagaattttttctgttctaggcaattgtctcttgttttgtgactcccttggtgggaatctctctcaaaatgtgatattcatggaggcaactgaagtaccagcaagcttgtccaacctgccttgcttggttgtgtttttttagttttttttccccaggctggtctcaagaacttctgggctcaagggatctgctcacattggcctcccaaagtgttgggattacaggcatgaaccactgcttctggctttaaatatatatatattttttgagacaggctcttgctttgtcacccaggctcgagtagcagtggcgcgatcacagctcactacagccgcaatctcccgggctcaggtaatcctcccacctcagcctcctgggtagccaggaccacaggcacacaccactatgcccagctaattttcgtattttttgtggagacagatttttgacttgttgcccaggctggtctcaaaattcctgggctcaagcgatgcactcccccacctcttaacctcctaaagtgtggggattacaggaatgagccctaacttagggttttgttttttttgtttgtttgtttttctgtactctgtatactccagggtatttcagatgtaaggtatttcaatacatctaataaatttcctggtctagacttggtgacagccatttctccaaaagttctgcttcattttgtgggaaatgctatttgaagataataatctaggcacagatatagtcattgtttctagttaggccatttctttttcttcttcttcttttttttttttttttttttttttcttttgcgacaggtcttgctctgttgcccaggctggagtacaatggcataatcatagctcactacatcctcaaactcctgggctcaagtgcttcgccttcctcagcctcccaagtacctgggactataggtgcatgccaccatgcctggctgattttttttttttttttctagatacggagtcttgctacgttgcccacgctggtcttgaactcctgggctcaagtgatcctcctgcttcagcctcccaaaatgttgatattaccggcataagccactgtgcctggcctagtttgggcatttctaggcctttttagtagactgaactaaaagagactataatatagtctcttttgctgaaaatctgggttcctaaccacacaagtatttgctcttcctaatgtatacataaatacataggtatgcatatatgtaacaataccaatattttctagccatagtatgactgaaggtaagctttctttggggtagtataaaatttctgtgtttgccaatcacttgaaataataactccttgtgtgcatcacacacatccatgttgctgcctgtgtcagtcagtgtagagttctccagaaaatcggagcccaatatgatagatgcaagagattgatcaggaggagtggcttaagtggttatggagtctgagaagtcccatgatctgctgtctgcaagatggagacccaagaaagcctgtggtataacttagtcccactccaaagccctgagaaccagggacaccagtggcataagtcctggagtcaaaagacctgagaaccaggagctctgatgtctgagggtggaagaggatgtcccaactcaagaagagacagaatttgcccttcctctactttttgttcttttcagactcaacaggttggatgatgccccagatactgcccaggttggtgagggcggatcttctgtactcagtctactgattcaaatgctaaagtcttccagaaacaccctcatagtcagaagtaatgttgaccacctatcgggtatgtcttagcccgggcaaactgaggcataaaattaactatcacagtatttcttttggattaccgagtagaataccgtggtatgaatatggcacagtctgattaccttttctcctgtgggtggacatttggtgtctttctagtttggggctattatggataatgattcttgtatgagtttgcttttgttttcctgatatatatgccaaggagtggaattgctgagtcatagggtaggcgtatcattaactttattagacagtgctgaacagttttctaaagtatttacatcagtttacacttccaccagtagtgtgccagaggtcccgttgttctcaatctcctgtattgatttccgtcatttctatttttctttttctttctttttttttttttttttttcagactgagtctgtttctgtcgcccagactggagtgcagtggcatgatcttggctcactgccctctgggttcaagtgattctagtgcctcagcctccgagtagctgggattacaggcgccaccaccatgcctggctgttattattattattattattattatttttgagatggagttctgctcttgttgcccaggctggagtgcaatggcgcaatctcggctcactgcaatctccgcctcccaggttgaaacgattctctggcctcagcctcctgagtagctgggattacaggtgcctgccaccgcgcctgacctattttttctatttttagtagagatggggtttcaccatgttggccaggctggtctcaaattcctgacctcaagtgatccgcccgcttcagcctcccagatgctgcaattacaggcgtgagccactacgcctggcttctcctagttttcttattctgatatttgctcaacatttttttccaaccctgtactgaattttgtatgtctgttatcaaagctttttttttttttttttttgagacagaatctcactctgccacccaggctggagtgcagtggtgccatctcagctcactgcaacctccaagtcccgggttcaatggattctcttgcctcagcctccctagtatcccgagtagctgggattacaggcacacactaccactctgtatagtttttgtatttttatagagaaggggttttgccatgttggccaggctggtctggaactcctagcctcaagcaatctgcctgctttggcctcccaaagcgttgggattatagatgtgagccaccatgcccggctcagattttgattttagaatgttcacacttacaaatggaaattaaaatgccttgagaagttttttttcgaagctgagttaagagttagtccctttatatcaattttcattattaaaaagttctcaggaaccaaataacattggtccccttaaattgaggcagttctgctcaaaatggatgcttggggcccaagctgaacaacagtggttgttgaggaatctagttagaattgcgttataggaattcccttttttttttttttttttttttttgagacagagtctcgctctctcgcccaggctggagtgcagtggcacgatctcggctcactgcaagccccgcttcccgggttcacgccattgtcttgcctcagcctcccgagtagctgggactacaggcgcccgccgccacgcccgactaattttttgtaatttttgtagagatggggtttcaccatgttagccaggatggcctcgatctcctgacctcatgatccgcccacctcggcctcctaaagtgctgggattacaggcgtgagctaccgcgaccggcaggaattctttagtccaacatttgtggtgcaaactttgaggttttgaacaaatacttttttttttttttttgagaaaatatttgacagcccagggcctctctctagagccgcatcccctgcccgtgttggctcatcaagttggcactgaagtcggatctctaaaatgttcgccaagaaagccaactccttcatgtacttttaatacttaaagcatgtgtttttatcttttaaatccacagttcagagtcgtgacacttcaagaggtgggcagattattcatttgtgaatgaacagcatttatgagaaatttggagaaattttatgtttgagagacacgaagaatccagagctttccaaaacagactgatgatcacacccaccggggagtttatgaaaatgcaagcccctggagcacgggcctctgctggatattcggaatcatggggctgagtagggccaggaatctgtacttttagaacagccatattatctaaagtatatagtcattcccagtccaagctctgtaaatcctgaagagaaaaatctaaaaactgcatatccggattatgttattctagcttcctgtagaaatcaggcttcaaggagcatacagccattctcatcaacatgagacacggatttgtaggcaatttctgtacctttcataaagctggctaaaagcatcagccggtatttatataagaatccatgtctgttctttttttccaaaaatcctagagcagttggctcctcagataaccctgtgtgtttcttttatccagtaaaagcagcgcatccagaggtacttgtttcctggccttctgcgaagcccacagataaattaggtctcatttggaaacgtcccatttcgaaaagcctgaggtatctatctctgcctaccgactgatttacagcctcactttaaaatgttagtctgttcttaaaaagggtttataactgcatctactataataataaaatgtaagcaaccttgcgctaggtactgaacaatttcatagctttgaactctccaaaatgttctagaagccaatacagaaaacccaaaaatctcagtttttgtttgcagaaggggcaagagaaccggttgtgttagccctccaagtgcccagcgccagcatagggtctgtctaacacacagcccaggctctgtaaacctttgctaaaagagcgaatcaacaaggaataagtaatggataataataataaataataatgaatccattcttccttcggtcgtgggtctggcaggcataaattccggccgggattccgaccccagggccagagcaggactcgccttggcgtctatgagtgggcggggcttccctggggtaccgcccacgtcgggcgggacctgagggccgctggaggggcggggcgtctatgaggtcccgcccatgcgggggcggggcctgcggcgcgcgggaagcggcgcgcgctgcgcgggaggtgacggtgcctctgactgtccgggtccctccaggtacggcttccctggcccgggcagctccgcggctcttttggtcgcgtcggtccgggccagaggccctcgccgagggcgggcccctgggccccgggatagctccggagcggcgcgcgttggggcggcggggccccgtccacccccggccccgcgcggcctcctcccggcggcctcagtcccagcttcccgggcccagcgcccggtccctgggaaaggcggggttctcctctcgccccgccgccccggtcccctaccccgtttggccccctcttccgggaggctcctcccggggcgggcccctccccgggctctcagggcgcgcccctagcccctactaagcggggacaggccgtgcagacggccggggcccctaggtagcctttacctgggtgtttcgttttgcttttctggatgtagcggcgtatcataaacttgtggatgtcaggacccagcgaagcattttaggtggagctagcaaggtgttattgtcagatggcaacgttaacatcctttcccaatgcagtgtgcattttaaatggctcctggcccctattcagcgctcaataaccctttgctgctgttaacactgttgtttaatccatcaccagcattttgcagctttctcctgtcttgaagaagtagaacggtgcccgagaaacgtttttccccttcgagactcaggaggatgaaagtcatcacttgtgaaatagcctggcacaacaaggagcccgtgtacagcctggacttccagcatgggacggctgggaggatccacagactggcgtctgccggcgtggacaccaatgtcagggtaaactggggcagagatagacatccgggaacactgcttgaagcaatagttttcattcttttacttaaaaccagtgtcggctgggcgcggtggcttacgcctgtaatcccagtgctttgggaggctgaggtgagaggatcgcttgagtccaggagttcgacaccagcctgggcaacagccagacatgaaaaagtagcgggacgtggcagtgtgcagctgtaggcccagctacttgggaagttgaagtgagaggatcgcttgagcctaggagtttgaagcaagcaacgatcactccactgcactccagcctgggtgacagagccagacccttctcttaagtaaatgaatgaatgaattaacgtatgtcaacaaactaaactactttgtcatctagcccagaatgctaaatttccagggcctgcggtgaacaatgaaagcaaaagagagctgctttcttttttttttttttgagacggagtcttgctctgttgcccaggtgggagtgcagtggtgcaatctcgacttactgcaacctctgtctcccaggttcaagctattctcctgcctcagcctcccaaataactgggactacagccgctcatcaccacacctggctaatttttgtatttttagtagagatggggttttaccatgttggccaggctggtctcaaactcctgacctcaggtgatccacccaccttggcctcccaaagtgctgggattacaggcctgagccaccatgcccggctctgctttcttatttgattcattttccctagattattgtaactggacgttcattgttttgggatcctgatcctggttcctactgggtaacaagttgctctagaaagaaggcggagggggacagtagacatttatgttttagatagggagttctttgattttatgtttcaaaagaaaaactaagttttctttctgaaaataagcatagttttgttttttttttttttttgagacagggtcttactctgtcgcccaggctggagtgcagtggcctgatcttggctcagtgcagccccgacccggggctcaagtgatcctccctcttaagcctcccgcataactggaactacaggcatgtgccatcacacttggctaattttttaaattttctgtagagactaggtctcactgtgtttccaggctggtcttgaactcctggcctcaagtgatttacccaccttggcctcctaaactgctgggattacagttgtgagccaccacacccagcccatagtattgttttaatacagacagtataatatgtgcccattctatgtttttcaaatgaatgtgttggtattgacagatctggaaggtagaaaagggaccagatggaaaagccatcgtggaatttttgtccaatcttgctcgtcataccaaagccgtcaatgttgtgcgtttttctccaactggggaaattttagcatcgggaggagatggtgagtattgctgtccttcagagattcttcgggaaccagatagatacctgtgtgtcttgtgtcagatagtgagatttgagctggatatgctttttttttttttttgagatagagtttcactcttgttccccaggctggagtgcagtggtgcaaactcgactcactgcaacctccgcctcctgggttcaagcgattctcctgcctcagcctcctgagtagctgggattacaggcgcctgccaccacgcccggctagtttttttgtgtgtttttagtagagacagggtttcatcatgttggtcaggctgatctcgaactcctgacctcaggtgatccacctgcctcggcctcccaaagtgttgggattacaggcgtgagccactgcgcccggcctggatatgctttttagttcaggtgtggctgaccctctcaatctgtcatttaggtagttcagtaaaatactgttctagggaatgtggtagagtcagggagggaggacagcaagatgaaaccaggaacacctgtttgaaaacagctgctttcccgcaagctcccaccaggctgttctaagacgagatggaaaggcacttaccattctgtcacatcccaagcaaggcgactgttctggttttgttggattgttagtttaacatctgtggtgatcagagtcagttctgtgtctctgtgtaattaattaaatggctttaggactgtgttagtaattaattggctttgggagttttttttttttttttttttgagacagtctcactgttatctaggctggagtgcagtggcacaatcttggctcactgcaacctctgcctcccaggttcaagcgattctcctgcctcagcctcacaagtagctgggattacaggcgcctgccaccacccccggctaatttttgtatttttagtagagatggggtttcgccttgtcagccaggctggtctcaaactcctgagctcaggcaatctgcctgcctcggcctcccaaagtgctaggattacaggcgtgagccaccgcgcccgggctatttgggcatgaattctaaactgggatatgaaagaattcagcaatggcaaagttcctcatggaggtgtgccatgctcagaagtgcagtgtgccctcccactggcccctcttcagtgggccctgagtagctgctcgtgtttgatctccctgtaagaaaggcagtagctgaaaagcacctaagctgccaacactgtggaaacccccgcaatgctccctttcttcacagtgacatacttgttgtaatacccatagtagcctctgaaacgctccagcagtgccggtcggggtaagatcccgcgtcggtacccagcttggcagctcctctggtttgacatctgtgtgttttctcccattccctgctgtgactgatgctgctttggagtcctggtgtctgcagtgccgggctgctggagggtgctggggagggagcataccgggagtgtcattaatgaatggccttgtgatttgtgcttgcttgtttggtgggaatagattgattcttgttttctgcctgtgcttaaatgggataaaactatatggaaaaagtaaaccaggctgggcgcggtcgctcacacatgttgtaatcccagcactttgggagaccgaggcaggtggatcatttggggtcaggagtttgagatcagcctggccaatatagtgagacctcatctctactaaaaatacaaaaattagctgggcatggtggtgcgctcctataatcctagctactcaggaggctgaggtggagaatcgctgtaacctgggaggtggaagttgcactgagccaagattgggccattgcactccagcctgggcaacagagtgagagtctgtctcaaaaaaaaaaaaaaaaagtaaacctttttaccatactttaaaacaatctagaaactattacaaaataaaacagaaatctaaagtttttttttgcaggaggaggaaaagagacctggttgagttcagtgccatgatacccagagtgcatgaagggatgtgtgtgtgtgtgtgtgtgtgtgtgtgtgtgtgtgtgtgtgcgcgcgcacgctgatttgtagagggaaaagtggggagcaggagcgccacctgggggtggctacctgctgtctgccctgaggttgcacatggcagcccccattttccaaagtcccttggtcttggaggcccagaaacctgctgttgtcagcacgtggagagtgttcatccatcagggccaatggcatgttaaccaagctcccagactaatgtgtgcgaataggattccggttaacttagcatgggaatgcaggctgggtgcggtggctcacgcctgtaatcccagcactttgggaggctgaggtgggcagatcacctgaggtcaggggttcgagaccagcctgaccaacatggagaaacctcgtctctactaaaaatacaaaattagctgggtgtggtggtgcatacctgtagtcccagctattcgggaggctgaggcaggagaatcgcctgaacccgggaggcgaaggttgtggtgagccaagattgcaccattgcactccagcctgggcaataagagtgaaacaccatctcaaaaaaaaaaaaaaaaaagaaagaaaaacaaagaatgggaatgcgtatgtcctcacaacctcattcattcactgtcctgctgtgcacattcctaaaagggaagctaagggatggtcagaaggttacgtggtaatcgtagagtcagaatgtggggagttattggacttagacaatgggtgacctcaggctaaagtacctgatatctataatggtattaatagctgacacttacatggggcttactatctgccagccattgtgttgtaagtgtgttatatacattggccaatttaatcctcacaacagcctgtgaggtagatatattgttatcctcatttttgagacagggtcttgctctgtcactgaggctagagtgcagtggcaagatcaggactcactgcagcctccacctcccgggctcaagtgatcctcccacctcagcctcctgcgtagtgggaccagaggtgtgtgccaccacacctggctaatttttttgatttttagtagagacaaggtcttgctctcttgcccaggctggtcttgagctcctgggctaaaacaacccttccatctcagcctcccaaagtgctggcattacaggcgtgagccaccccaccctgcctattatccccatttacaggtgaggaaactgagacatcaagatgctaagtgacttgctgaaggtttctgagctaggaacatttgccaacccttgcactgagggttctttgctgttttgtttttctattcagctatttataggttatgccttcagatttattaatgtagccagtcattttgcagtggcatttgctggcctagggacccttctgtttaaggtgattttgtatagctctgatctgttatgaatttgattttggagttttagctcagaaggcaatttgcctactttccctgttgaaatgcttggaagtaaatcatcctggccatagtgtccactgaacaacataaatgttgttttaataccctaaaaatcctgacatgcagctaatttttttgtatttttagtagagacagttagccaggatggtcctgggaggcagaggttgcagtgagccaagattgcgccactgcactccagcctgggcgacagggtgagactccgtctcaaaaaaaaaaaaaaaaatgaaaataaaaatcctaatatgaaggagtgtgggtgaagcgtggatcactgttactgaatcaccctgcagatgctgtcatcctattgtggaaggtgaatgataacaaggagccggagcagatcgcttttcaggatgaggacgaggcccagctgaacaaggagaactggacggttgtgaagactctgcggtaacttgggagggaccatggcagtgatctctgtttacgatgagtgcattaaatggaatataccttttgactttttttttcttttcttttgagatagggtctcattgtcgcccaggctggagtgctgtactgtgatcacagtaccctgcagccttgacttcccgggctcaagtgatcctctcacctcccaaatagctgggactacaggtgcatgctaccatgccctgctgatttttaaattttttttttttttttttttttttttttttagtatttattgatcattcttgggtgtttctcggagagggggatttggcagggtcataggacaatagtggagggaaggtcagcagataaacaagtgaacaagggtctctggttttcctaggcagaggacccagtggccttccgcagtgtttgtgtccctgggtacttgagattagggagtggtgatgactctgaaggagcatgctgccttcaagcatctgtttaacaaagcacatcttgtaccgtccttaatccatttaaccctgagttgacacagcacatgtttcagagagcagggggttgggggtaaggttatagattagcagcatcccaaggcagaagaatttttcttagtacagaacaaaatggagtctcctatgtctacctctttctacacagacacagcaacaatctgatttctctatcttttccccacatttcccctttttctattcgacaaaaccgccatcgtcatcatggcccgttctcagtgagctgttgggtacacctcccagacggggtggcggccgggtagaggggctcctcacttcccagacagggcggccgggcagaggcgccccccacctcccggacggggcagctggccgggcgggggctgccccccacctcctggacggggcagctgccgggcagagatgctcctctcttcccagacggggcggctgctgggcggaggggctcctctcttcccagacggggcggctgccgggcggaggggctcctcacttctcagacggggcggccgggcagagacgctcctcacctcccagacagggcggcggggcagaggcgctccccacatctcagacgatgggcggccgggcagagacgctactcacttcctagacggggtggcggccgggcagaggctgcaatctcagcactttgggaggccaaggcaggcggctgggaggtggaggttgtagcgagcggagaccacgccagtgccctccagcctgggcaacattgagcactgagtgagtgagactctgtctgcaatcccggcacctcgggaggctgaggctggcagatcactcgcgattaggagctggagaccagcccggccaacacagcgaaaccccatctccaccaaaaaaatacgaaaaccagacaggcgtggcggcgtgcgcctgcaatcccaggcactcggcaggctgaggcaggagaatcaggcagggaggttgcagtgagccgagatggcggcagtaccgtccagcctcggcttggcatcagagggagactgtggagagagcgggagagggagagggagacggtggagggagagggagagggagaggatttttaaatttctgtggagacagggtctcactatgttgcccaggctggtctaatttagaagttttatttatatgaaacagtcctaagacaatagttttaaaggatgaaagcataattaaaatggattttcttagtttcggctatacatttttcttagtaaaaagtattcaattttaaagatacagctatcctttttttttttttttttttttttagatggagttttgctcttgttgcccaggctggagtgcaatggcatgatctcggctcaccgcaacctctgcctcctgggttcaagcgattctcctacctcagcctcccgagtagctgggattacaggcctgcaccactatgcccagctaatttttttgtatttttagtagagacggggtttctccatgttggtcaggctagtctcaaactcccaacctcaggtgatccgcccacctcggcctcccaaagtgctgggattacaggcgtgagccactgcgaccggtcagatatagctatccttgaaagtagttttttatagctatagctaatatagtgccagtggaaattttggaatctcattttaatgcttagttctggagattgtccttatatttttgataacttgtccgtttttgagttaataattgctttttgttttgttttgtttagagtcagagtctcactctgttgcgcaggctggagtgcagtggcatgatcttggctcactgcaatctctgcctgctgggttcaggggattctcctgcctcagcccccaagtagcagggactacaggtgtgcgccaccacacctggctattttttttttggctaatttttttttttttttgagatggagtctcactctgtcgccaggctggagtgtagtggcgcgatcttggctcactgcaatctctgcctcccaggttcaagtgattcccctccctcaccctcctgagtagctgggtctgcaggtgtgcaccaccacgcctggctaattttttgtattttagtagagacgtggtttcaccatgttggccaggatggtctcgatctcccgaccttgtgatctgcctgcctcggcctcccaaagtgctgggattacaggcgtgagccacagcacctggctgatttttgtattttgagtagagatgggattttactgtgttagccaggctggccttgaactcctgaccacaggcagtctgtctaccttggcctcccaaagtgctgggattacaggggtaagctgctatacctggggagtaattgcttttttcctctttgtttttggattctaggggccacttagaagatgtgtatgatatttgctgggcaactgatgggaatttaatggcttctgcctctgtggataacacagccatcatatgggatgtcagcaaaggtaaatgatatatttttgttattagcaggaagaaatattctaagcatctataaaagcctaaaagtctaacttgctttaactttttttttttttttttttgagacaggatctcactctgccgcccaggctggagtgcagtggtgcgatcttggttcactgcaacctctgcctcctagattcaagcgatcctcctgcctcagtctcccaagtagctgggactacaggcatgcaccaccacacccagttaatttttgtatttttagtagagacgggtttcatcatgttggccaggctggtctcaaactcctaacctcaggtgatctgcccgcctcagcctcccaaagtgctgggattacaggcatgaaccactgcccctggccctaacttaccttaactttattttttatttttatttttttggagacggagtttcgctcttgtccaggttggagtgcaatgtcacaatcttagctcactgaaatctccacctcccgggttcaagcgattctcctgcctcagcatcctgagtagctggactacaggtgtctgccaccacacctggctaatttttgtatcattaacagagacggggtttcaccgttggccagtctggtctctatctcttgacctcaggtgatccacccgcctcggcctcccaaagtgctgggattacaggcatgagccaccacacccggcctacttgctttaactttaaaagcaacacaaaaaattgttttagtgaactaaagtaggtggttggctcaacaggataggggttagtcccatatgctatggattgtcagagggtaagaggcttagcactggtgctgcaagttactgatgctgaagccaggcaaatcccacatggtggggccagcagataagatgacaggcccgggccctgcctttatggaggttaggatctcgggaagattaacaagtcacttataatttatagggcattgcatgctagttgatggggtaggtgggatcaggtttccattttagaagatcaaggaaagccagggacattctgttctctagttggggagacagtggacatgtgaaaagttatagtggtgtgaaaatagctgtgaaatgccaaaagcaagtatggctaactcctaatcatttttatcccctgccatcctttactcaaactttgttttctcccaaacctcttcctgccaattctacaactcaagtacctgggtagggcagttgttgttggctgccaccgcagcactgtgtcagcccagttctcatccagtctataaaaatttttgctctttttagtaccatgctgtccagccaagccatcctccatcctccgttctgtcttgttttgtgtggtttttttttttattttagatggagtctccctcagttccccaggatggagtgcagtggtgcgatctcagctcactgcaacctctgcctcccgggttcaacaattctcctgcctcagccctcaaggtagctgggattacaggcgcccgccaccactcccagctaatttttgtatttttagaagagatggggtttgcccatgttggccaggctggtcccaaactcctgacttgaagcgatctgcctgcgtcggcctcccaaagtgctgggattacaggcatgagccattgcgactggccaggattttaggttttatcataagtgtgatgggttgttactgaacctcaccaaaaacctcaaaaaaaaaaaaaaaaaaaaaaaaagaatgacttgtcaggcacagtggctcaggcctgtaatcccagcactttgggaggattgctcaagcctaggaattcaagaccagcatgggcaacatggcaaaaccctctctctaccaaaaaaatacaaaaattagctgggtgtggtagtacatgcctatagtcccagctactagggctgctaagtctcttgagcctgggaagttgaggctgcagtgagctctgacggcgccactgcactccagcctgggcaacagaaccacaccctgtctcaaaaaaaaaagaaaaaaaaaaaggaatggccaaggcttcataactctcttgtctttttatgcaggcgatctctgtgtgctaaatattttccccgaagtcccttttccatccctgttcgcattgtctgctctgggccctcctcatctctctcctggtctactcggtcacctcctaactagtgaccctctttgtcatcttctaaacctgtttcacctttaaaatgcagacagcttctcagcttgaattcacagccttttccttacacacaaggtctctgtaatacttctcctttcctccttatcttctgttcttggccctcctctgtacccattagcagttctcagctacctctccctgctccatattcacttcgctaagctgttttaacccagggattccctgacaataccttcttccacccttcatcccctcttcatcctgcctgacctggggaactgaacttagatcttctcagaccctccgccctgtgctgtcagctcccctcccccggtccacatgtgtgatccttgcttgttgatgggtctgtctgatctgtgggctccctgagggtggggactgcatgaagtcatctttgtgaccccagagcctgacacagggttttagtacagagtctctcacttactgcctgctgagtgatgcgtggtaaagggaataatatttaagtcatagtttatactatttgggctcaaacaggttttggtaatgctgttttggtgcgtgtgtgtgtgttttttttgtaggacaaaagatatcaatttttaatgaacataaaagttatgtccaaggagtaacctgggaccctttgggtcaatatgttgctactctgagctgtgacaggtaaattcagctttggcatttacttggaatttctttgtatttacttggaattttctgaagagaggtatttatcgtaacttagccaagatttatcatagtctaactttgattcttttgttcttgttttcatactcattcttacaacataatcagaaattggaaattaattaggacaagtgccttacacgaagtttgtacttagtaaatctttttttttttttttttttttagacacagtctcactctgtcacccaggcaggtgttgtggcgcaatctcacaatctcagctcactgcaacctctgcctcctggtttcaagcgattctcctgtctcagcttccctattagctgggattacaggcacatgccaccatgcccggttaatttttgtgtttttagtagagacagggtttcaccacgttggtcaagctgttctcaaactcctaacctcaaatgatctgcctgccttggccaatgtgctgggattacaggcatgagccaccatgccccgccctgaacttagtaaatctttattattattactatttttttttttttttgagagaggggcttactctgtcacccaggctggagtgcagtggtgcaatcacagctcactgcagctttgacctcctgggctcgagcaatcctcatgcttcagccccccaagtaattgggactacgggtgtgcaccaccacacccggctaatttttatatttttttgtaaagatgggattttgccatgttgcccaggctggtcgcgaactgttgagctcaagccatctgtctgccttggccacccaaagtgctaagattacaggtgtgctacggtgatttttatttttattttttttaaattgttttttgagacagaatctcactctgtcactctggctggaatgcagtggtgcgatctcggcatactgtaacctccacctcctaggttcaagcgattctcctgcctcatcctcctgagtagctgggattgcaagtgtgtaccaccatgcctggctaatttttgtatttttagtagagacagagtttcaccgtattgacgatgctggtctcaaactcctgacctcaggtgacctgcctgcgttggcctcccaaagtgctgggattacaggcgtgagccacctcgcccagcccagttattttaatgactccatttaaatggatataaaaataaactatttttgtgctttctgaaaagaagtcttgttgtcgtgtttactggcataattgcatttaattgtattgttggaacaaagagttagaaaaaatgaggagtgcctcctatattacttaatagtccttttgaatatttatctgactacttttaaataaaacaaattgaatataagatggccttggaataaaagtggtagggaggagttagtgtttatttttcatagaatcttctgttgtattctaaatgccatttattttctgacaagtgtgttttattcagacagtcatcagtaaaacaatctgattagctagtgggagtaatgtgacttaccaattttttttttttttttttgagacagaatctcgctctgttgcccaggctggagtgcagtgccacaatctcagcactgcaacctctgcctcccgggttcaagtgattcttctgcctcagcctcccgagtagcagggattacaggcgcccaccaccacgcccggctaattttttgtatttttggtagagatggggtttcaccatgttggccaggctggtctcgaactcctgacctcaagtgattcacccgcctctgcctcccaaagtgtcgggattacaggcgtgagctaccgcgcccggcctgtaatatcctttaggttgttaatacttgcttccttcttaattacccagttgtgaatatcattggtaaaagcttttgcaggctgaaaactgttgcggtggtaataggctgttggtaataagttgtttctgtgtgaagcataattcatttactagaagtggtaaatcagacatgttctttcttcagggtgctgcgagtatacagtatacagaagaagcgtgtggctttcaatgtttcgaagatgctgtctggaataggggctgaaggagaggtataaaatattttgccattctttttcagcagcgctttaactgagacttaggaagtcatgagctcctcccatacccttgcagccaaatcactggccacaaagagccgattccagaactacaataaggcttccttttggacagtcaaggctcagttactgtggtgggctagtctgtatggaaatggggacatctggagaccagggtagagccactgatggaggacaggacagtggttttcaaccctggttgcacggtggaatcacctgggaagaattacaaatatgggtgctggccgggcgccgtggctcatgactggaatcccagcactttgggagactgaggtgggcggatcacttgaggtcaggagtttgagaccagcctggccaacatggccaaaccccatctcaatgaattgcaaaaattagccagctgtggtggtgcatgcctgtaatcccagctactcgggaggctgaggcatgagaatcacctgaacctgggaggcggaggtcttagccgtgagcggagatcatgccactgcactctagcctgggcgacagagcgagactcgatttcaaaaataaaatgaaataaggctgggcatgatggctcatgcctgtaatcctagcactttgggaggctgaggcaggtggatcacctgaggtcaggagtttgggactggcctggccaacatggtgaaaccctgtctctacaaaaaatataaaattagccgggtgcatgcatgtgatcccagctattcaggaggctgaggcaggagaattgcttgaacctgggaggtggaggttgcagtgagctgaaatcacaccattgcactccagcctgggtgacaagagcgaaactcagtctcaaaataaataaataaataaaaataaaataaaaataaaaatatggatgccttggccccaacctgagtggcgtgattcacttggctggaggtaagcagggcctccatgattctcaggtatagcaagggctggtcactactgatctgggaagatccctacacgaggcaacagaagacaggcaggtcgagcgttggatctgtctggcagcaggcagtttactatcttggcaggtaggtagagagttttgctagcagacagcagagacccagccaaaacactggtatttaggaataggaaggattttgactttcaaataattggcaaatgaaaataggaccctttttgtaaaggaatcaaggctaccgaggcaggcagcgaggtgcggggagcaagctggttactggcttcacacggggacatggtgcaaatgcatccaaggaaccagggtaaggcagtgtgggctgggcgctgacaggcactgagaggtcacacctgtgaagtaagaatagtaatgcttcccgggtgcggtggctcagcctgtaatcccagcactttggaaggcagaggtgggcagatcacctgaggtcaggagttcgagactagcctggctaacatggtgaaaccctgtctctactagaaatacagaaatttgctgggcatagtggcgcatgcctgtagtcccagctactccggtggctgaggcacgaggatcactggaacctgggaggtggagtttgcggtgagccgagattgcgccattgcactccagcctgggcaacaagagcgaaactctggctcaaaaaaaaatatgtgtatatatatgtttttgtatatattatatataatatatactttaatatgttatatatttatattatatataatatatttttatattatacataatatatatttttatattatacataatatatatttttatattatacataatatatatttttatattatacataatatatatttttatattatacataatatatatttttatattatacataatatatatttttatattatacataatatatatttttatattatacataatatatatttttatattatacataatatatatttttatattatacataatatatattttatattatacataatatatatttttatattatatataatatatatttttatattatatattttatatatataaaaatatatctattacatatatatatatatgaatagtaatgccggcttccttgtgttcttaagaattaaatgcttgtttgtttgttgagacagtgtctggctctgtcacccaggctggagtgcagtggcacgatcttggctcactgcaacctttgcttcctgggttcaagcggttctcctgcctcagcctcccgagaagctgggattacaggcgtgtgccaccacacttagataatttttgtatttttagtagagatggggttttgctatgttggccaggctggtctcgtactcctggactcaagtgatccgcccgccttggcctcccaaagtgctgggattacaggtgtgagccaccatgtctggcaaatgcttgatgtttataaatagtagtaaaaactgtcccagacaggtgttaaagaaatgttgttttaaaagattaatgattaccagtttaataatccactattttctttttttaaagggtgcatttgttaatagctggatgtggtggcatgtgcctgtagtcccaggaggctgagacgggaggattgctttgagcccagaagttctaggttacagcgacctatgattgcgccactgcactctagcctgggtgacagagcgagactctgtatctaaagagtgcattcagttggaaattctaatgaatccacacagatagaaagcagaggtctcctggtcatcttcccactgtctgccagtctcaggccccagacatgccactattgaccctgtggtttgtgttcttaagagtttttaaaaataattttagaaccacataaaacacacatatatacatatagctttacctaacaaaaatgtgtggtcagttttcatgaatgtttacccttgcagtgttgtacaattatttgatttgtaatgtgtttcagtttcatttatgattatgtcaacaataaatgacactatgtaaagaaaaccataggcacatatagcagttgggaagcgtttatttgtgagtgtaaagatttggaaaaatgtttaagctttgtgtgtagaaaacaaacaaaaaaaataataaaaataaattttgtgtgcgacaggcaagaagctaccggatgtttcacgacgacagcatgaagtctttcttccgtagactgagtttcactcccgacggatctttgcttctcacgccaggtgtgtttcgtagctttggacttaaaggaatgatggccgagtggggatgtctgctcccgttttacgctgcagcttatcagctcagtgaatgctgattagagtgggggtccccgacttacctgcccattggaacctccaggagagcttcaaaaaacacattggtgcctatgtcccatccctagagattgtagtgtatgtaattggtctgggtggcctggcttttggaattttaagaagatttccaagtgattgtaatgtgcagaaaagtttgggagtaatgagtttaaaatgataggcattttctcttagataaatttaacttttggctgggcacagtggatcacacctgtaatcccagcactttgggaggctgaggcgggcggatcacttgaggtcaagagttcatgaccagcctggccaacatggtgaaacaccctctctattaaaaatacaaaaattaatgatgtggtggcgcataccctgtaatcccagccacttgggagactgcggcaggagaatcgcttgaacccaggaggcagagggtgcagtgagccgagatcacaccactgtactccagcctgggcgacagagtgatatcttatctaaaaaaaaaaaaaaaaaaaaaaaaagaaactttactatttaaaccctttcaatgaatgctttttcattcattaacatgtgtatggaagccatagcgctaaagccaaagataaagctcctttattgtttttattctcctcaataaagcgcatttgtgacaggattagactcatggacaaacttgtggaagcagcagtggtcaaaatcaaaaggtcagccaagtagcaaggactagataggtttattgtccctatgtccctaggaaggcaaggggctcagcccagcaagataaggctaggcattattgtggccacagtgttctcagaggagaatgtctgctcattgccgtggctccaggaccatcctgtgcatagagatgacaacatagcccagggttgggccaaacgggagggcactgtcttggtttgccactgagtcccatcccagctgagccagggagggcctgagaagggcgtgaatcacacatgcagctgtgtgggtggggctttaaagaacactgcggaacatgtgcgaatgacactttggcccaagaagtctcaggactaagaataagtagttgtttaggttatatttactaaagttagttattaaaagttattcactaaacccagtaataaatccttttttttttttttttttttgagactgagttttgccctgttgcccagctggagtgcagtggcacgatcttggctcaccactgcagcctccgcctcccagtttcaagcgattctcctgcctcagcctcctgagtagctgggattacaggtgtgcgccaccactcccagctaatttttgtatttttagtagagacggggtttcaccatgttggtcaggctggtctcaaactcctgaccttgtgatccgcctgccttggcctccgaaagtgctgggattacaggcttgagccaccacgcccggccctttttttttttttaaattatttattttatttatttattaatttatttattttgagatggagtttcgctcttgttacccaggctggagtgcaatggcacgatctcggctcacagcaacctccgcctcccgggttcaagccattctcctgcctcagcctccggagtagctgggattacaggcatgcgccaccacgcccagctaattttgtatttttagtagagacggggtttctccatgttggtcagtctggtctcgaactccggacctcaggtgatctgcccaccttggcctcccaaagtgctgggattataggtgtgagccattgcgctggcctttttttttttttttttttttttttttaaaaagcagagtctcgctctgtcacccaggctggagtgcagtggcaccatcttggctcactgtagcctccacctcctgggttcaagcgattctcctgcctcagcctcctgagtagctgagattacaggcgcctgccaccacaaccagataatttttgtatttttagtagagatggggtttcgccatgttggccaggctggtcccaaactcctgacctcaggtgatctgcccaccttggcctcccaaagtgttgggattacaggttacaggtgtgagccactgcgcccagccccagtagcaaatcctttactatttggccactctaaaaatattttcaattaaaatcaagtagcaaatggatgtctgttatcaacgttattgttctttgtggtgttagtaagtgtgggaaaaacaggaaaatgaaattacaaagattggaaaagaacagataaaaaactgcaataggattgtatttctagaaaatccaagagattttaaaaatagtattagaatttttaaaataatttgataagatggctggatattataaaatatataaaaattcctatctttcgtctatattggcagtgagtacttagaaatggaaggaggagaaatatttcattcagagtagtgcaaaacctgcaaaatacatagagtaaatttatttatttatttattttttgagacagggtctcactctgtcacccaggctggagtacagtggtgtgatcatggcccactgcatcagccttgatctcctgagttcagggaatcctcccacctcagcctccctactagctgggaccacaggcgtgtagcaccatgcctggctaattttcttatttttttgtagagacatggtcttgctatgttgcccaggctggtcttaaactcctgggctcaagcaccccttccgcctcggcctcccaaagagctgggattacaggtgtgagccaccacacccaggcagaagtaaatttaatgagaaaggggcaggacctttatggagaagtctagaaggtcttactgaaggttataaagcaagttctgaacaaatggaaagatatgtcgtgttctaacaattaacatactaatttcatttccaattagaattgcattaaagtttttttttaattggatgaaatctcagctttgtttagtagaataaatgctgaagaatagccaaagaagtattaaaaaaaaaacagtgatacttgggagggcatttgcctcaccacatatcagaagatcctataacactacttttagccaatcaatatggtgttgctataggaccaaacaaatagattagtggaccagaacacagaatccagaaaaagatctcaggatataaggcgatttaatatatgacctcaggtgctgttccagtggaaaaaaatctattatttatttgtaattaattgtatgttacttaaataattctcaagagaattagacactgaaggcagataggacaagagtatgtcattaagaaggttgggaagtgttgagattggacaaagacctattcctcttttttttgagagggtttcacccttgtcgcccaggcttgagagcattggcgtgatcttggctcactgcaacctccatctcctgagttcaagtgattcttctgcctcagcctcccaagtagctgggattacaggcgccggccaccatgcccagctaatttttgtatttttagtagagatgaggttttaccatgttggccagggtggtctcaaacttctgatctcaggtgatccacccgcctcagcctcccaaagtgctgggattacaggcgtgagccactgcacctggcctccttttttttttaattgacagatgaaattgtatgtagttgtgtatgacatgatgttttgaagtatatatatgttgtggaatgactaaatctagctaattagcatagcatggtctcacataattaggatttctgtggtttgaacgctttatatctcttagcatttttcaggaatataatacattgttatgaaccataatcaccatgttgtacaagagatggatcttgcaaagggaggactctattattgaatgagtagtgctggggtagccagctatgtggaagaaggtaaaattggaccccttgcctagatgtaaaaaataaattccaggtgaattcagtacttaaacacaaaaggtaaaaatagaaaactcttgtaaggaaatataggaggacattctaggaatggagaagacccaattaagactggaaactggctgggcatggtggctcaagcctgtaatcccagcactctgggaggccaaggtgggtggatcacctgaggtctggagttcaagaccagcctggccaacatggcaaaaccctgtctctactaaaaatacaaaaattagccgggcatggtgatgcacacctgtaatcccagctactcaagagcctgaggcaggagaatcgctccaacccaggaggcagaggttgcagtgagccaagatcgcaccactgcactctagcctgggcaacagagtgagactctgtctaaaaaaaaaaaaaaaaagtatatgttcaaggatgcttattgcaagcattgtttatagtggtaaaaaaccaaaagccaaaaaaatactcattaacagaggctgggtgaatgaatcttgcagtaaatattatgcagctacaaaaaaataatgcatcagtgctatgcaagttaactttcatgagtagttgattgaaacaagcaaaataaggagaagtgtcagttttgtaaaacaaatggactcaataaaaaatatcatagaggtatacatgtgattgagttataactgattgtaatgattatgtgagcatggaggaaatatacagatgacataatggtttgttgaatgttaaaatggatttcttggggatggaagaatggagtgggatgaaaagaggggcctgggtgcagtgactcacgcctgtaatcccagcactttgggaggcggaggagggcagatcacttgaggtcaggagttcgagaccaccctggccaacatggtgaaaccccctctctactaaaaatacaaaaattagccgggcatcgtggcaggtgcctgtaatcccggctactcaggaggctgaggcaggggaattgcttgaatctgggaggtggaggttgcagtgagccaagatcacgccatcgcactccagcctgggtgacagagcaagactccatctcaaagaaaaaaaaaagagggcagctatgtagaatgtattaataataataataaaaaagactattgatactgtctactgccctccctggtggatatgaaacagtcatatgtaaagttacgtgtgtgtatatgtatcaagaaatagcataaaacagggagatgtttccaagagcagcagtgtatgatggtcactctgacagggctgaactgttttaagtacagcagggggtgagtgtagaagagctctcagatggggactgttccccagagtgaagtcaggttctgaaggaggctggaggtttcagcagagggcaaggtctcctggcagcctcatggctggatagggaagttggggaaaggcgagtctcagcctttggatggcatccaaggctggaatccaggaaatagagatgagggtcctagggagaaaggagcctgggcagctgaatctagtcacggtgcttcaatcgaggaattgcctggaggctcaacggtgccctatggcaaaggctcactatgttctcctcgcccaagatcagaaccaggtccccggggattgcccacaggtaggtggagatgacaggtaggtagaactggagtaagggctgagaacagacagtgccggaatatatgtttttgtgctctgtcacaacattgtccagagaatataactgcagggggaagtattttgcaaaccggacctgaaggctcttgagtttctgttggtgaacagtttgctgaaacagtgacttttctttcctctccctcccttccctgttccccagctggatgtgtggaatctggtgaaaatgtaatgaataccacttatgttttctccaggaagaatcttaaaaggtatgcagtcaaggaaatgtttgaaatgtttacattttttttagacggagtttcgctcttgttgcccaggctggagtgcaatggtgcgatctctgctcactgcaacctctgcctcccgggttcaagtgattctcctgcctcagcctcttgagtaggtgggattacaggtgcccgccaccactcctagttaatttttgtatttttagtagagatggggttgcaccatgttggccaggttggtttcaaactgctgacctcaagtggtccgcttgcctcggcctcccaaagtgctgggaatacaggcatgagtcattgcacccggcttgtattttttttttttttttttttttagtagagatggggtttcgtcatgttggccaggctggtcttgaactcctgacctcaggtgatccgcctgcctcctcctcccaaagtgctgggtttataggtgtgagccaccgcgccctgccaaaatgtttaccttttatttttgcttttgcttagtcacagtgccttttcctaacactgcaattaatccattaggcccatcgctcatcttccatgtcctggaaaagccactcttgctgttcgctgctgtccggtctactttgaactgaggccagtggtggaaacaggtatcctcagagcctcaggggtgtgttatgttttctctccgaaacaggtcaccagagtggggtggagatttggattctgtcttatggggaaaggtgggtatctgggtttggttcagttcagttattttaaaaatattttatttttacatttaaatctatttatttatttattttgagaccaggttatcagcctggttaatttttgtatttttggtagcgacagcgtttcaccatgttgccaaggctggtcttgaactcctggactcaagtgatccacctgcctcggcctcccaaaatgctgggattacaggtgtgagcccctgtgcccggcctggtttagttatttttaaaagctggagcaaagactggggttatcaaaatacatgtcagtttttttttttttttctttcttcaggatatattttcttgcttaaggcactttaaaaggaatggacgtactccttttgtttgtctatgtctctcattatcaattttctttttcttttttttttttttgagatggggtcttgctctgtcgcccaggctggagtgcagtggtgcaatcttggctcactgcaaaccctgcctcccaggttcaagggattctccctcctatcctccagagtagctgggattacaggcgcatgccaccacacccagctaatttttgtatttttagtagagatgggattttgccatgttggccaggctggtctcgaactcctgacctcaggtgatccacccaccttggcctcccaaagtactgggattataggcgtgagccatcatgcccagccattttctttgttttcttgtgcttggggttcattgaacttcgtagatctatccgtttatagtttttattacatttgggaagtttcagccatttttccttcaaatgttatttctgttattcccttctcttattcaaatactcccattacacatgtattatattaggtcctttgaaattagttcctggcctttgatactacttactttttttgtttttttcttcttccagtgtttgattttggaagtctctatagctgtgttttgagtttgctaaccctttcttctgcatgctctgcccttggtcccatccagtgtgtttttctttgttgtggttctcatctctagagattcactttgggttttccttatatattctgtgcctctccatgctccatttttcctcttgctgctttcttttttttttttttcttgctctgttgcccaggctggggtgcagtggtataatctcggctcgttgcagccttcgtctcccaggttcaagtgaatctcccacctcagcctcccaagtagccaggattacaggtgtgcgccaccacacccagctactttttttatttttagtagaggcagggttttgccatgttggccagtctggtttcgaactcctgacctcaggtgatctgcccgcctcagtttcctcttgcttcttaagcatatagagtgcagttataatagctcttttaatgtccttgtatacaggttggttttgatttttttctcctcattgtgggtcatatcttcctgtttttgtttgcctggtactttttgattagatactagacactgacttttactttagtggatgctggatgtatttttattcttataaatattctttttttttttttttgtgacagagtcttcctctgccactaaggctggagtacagtggtgcaatctgagctcactgcaacctccgcctcctgggttcaagcgattctcctgtctcagcctcctgagtagttggtactacaggcacacacccccacgcctggctaatttttgtatttttgatagagacggggttttgccatgttgcttaggcaggtctcaaactcctgagctcaagtgatccacccggctcggcctcccaaagtgctgggattctaggcgtgagccattgcacctggtcagaagccttgtttctgtggttttactttgtctctgtccccaacccccaggtgtggagctgatgagtctgccctaccgcctggtgtttgctgtggcctcggaggattccgtgcttctgtatgacacccagcagtccttcccttttggttacgtgtctaatatacattaccacaccctcagtgacatttcatggtgagtggctgctaatgagggagagtgagtgaaggagaccgtggctgtatcctggaagacaccccggggttagggagcatttcattactaaagatggctttgggggacatattcaccaattttgtttcttatttatttttttgagaccaagtatcactctgtcacccgggctggagtgcagtggtgtgatctcgtttcactgcaacctccacctcccaggttcaagtgattttcatgcctcagcttcccaagtagctgggattacaggtgcgcaccactacgcctggctaattcttgtggttttagtagagatggggtttcgccctgttggccaggctggtatcaaactcctgggctcaacgatcctcctgccccagcctcccaaagtgctgggattacaggcgtgagccaccacgcccggccccaattttgttttttaaaggaatcaacattaaaaggaaagccgtttctagtttgccacaatacttgcttcttattttcacactggtgggttttgatggcattcagattgccttgtggggttaactggactttgataaactgaggggaggccttgtagactccctggccatttggggacttctgaggccctctgggaggaagcccttccctgcatgcccctgctgcccaggacagggaagtgccccaagctgggcctgtgtagaggatgtcactcagcactgtccttctgccaccttttggtccccaattcagcccccgtggcctgcttggcccagtgtgaggttttttttttgaaacagagtctcactgtcatccaggctggagtgcagtggaacgatcgtggctcactacaacctccgcctcctgggttcaagcaattctcctgcctcagcctcccgaatagctgggattacaggcgcccaccaccatggctggctaatttttttgtatttgtagtagagacagggtttcaccatgttggccaggctggtcttgaactcctgacctcaaatgatacacctgccttggcctcccaaagtgctgggattacaggcgtgagccaccgcacccggcctattcaagtgaaaattgctagtagcacagataggttgcagcgacttagcaaatcgcgatgaaactgcatgagtgagtcgctatcacacactcttttccagttgtatcttttccctggtttttgccttcaaacaagcttgtgattttgctcgaacttccctcttctaagtagatgtgagagtgttggtaaggtctgtaacttttccctgttttggggacgaaggtccagcgatggtgccttcctggccatttcttccacggacggttactgctcatttgtgacatttgagaaagatgaacttggaattcctttgaaagagaagccagttttgaacatgagaactcctgatacagcaaagaaaaccaagagtcagacacatcgagggtcttcgccaggacccagaccggtagagggaacccctgccagcagaacccaagaccccagcagccccggcacgactccccctcaggccagacaggccccagccccaacagtcatcagggaccctccctccatcactcctgctgtcaaaagccccttgccggggccttcggaggagaagaccctgcagcccagtagtcaaaacacaaaagcccacccatcccggagggtcactctgaacacactgcaagcctggagcaagacaacaccccggtaagaacttgttggaacaagatgtcattgcaaaatgaaacacaaaatgcagacagaacgctcccaccctgctgcaggtgaaatttcaggcggtgaatgcttcatgccagtaggttgccagagagattcttaacttcaaatccgagagtgtcatttcttgcatataggcctctgtttgttcctccagtttctgcctgtcagataaagcccaggctcctatgcacacacacagactgtgatttggctgcagcctgtcatccaggactgtggccactctctctcctgagtctgtggccttcatctccggcctagtcctgaatgtcatcttcccagagcactctctgccctttgaggcctctgtccttcccttctctggggaagccctggacacctcttcctcttggtgatgccaggagtctcctgaaagacccatttcaatgtaccctctctgtttgcagtctttgtggcccttcagcctttcccttgtcaccacacatcagattccatagcaggtgctttgatgctccagttcccctgctggttgtgagcccccaaggacaggaagcaggtcccattttttatttatgctgttctgcccaggatgtaggcaattccaggagtgtcttcctgagactgcgtttgatgtctccagcagcctggtcggtgagaaacggaggtcctgatctgataacaaataatccccaggaggtgcagagtcgtttcttccctgcttacatcagtgtggctggcacgcacgcctgtgtctgccacttctactggatacagagccacttagcacatccttctgccgtcaggcagcacagcctcctgtttccattcttcccctgcagctgatgtccagttacccctctgatcctgtatagttccttctccaccaagccctctgcctcccaaccttcccataaactgagtcacgaggagagctgggaagggggatgcagaggggagtggtggggatggtgagctggacagaagcgccctgtgcctctcagcctctcctgcgccaataggtcttctttggcaagttcataatatgtgtatgggttgctggctttaacgccctcttaaaatctctcatttctttctgcagattagcaatgtattttacaatttttctgtttgtttttatgtgacggaaggtattccttgaactatttttggtattaaattatttttcccctcttgatttcttctgaattatttaccaagcttcttgaagatgtaatcttttgcaaacaagaatagttgttgaaaattaagactctgggtttttatttatttatttattcatttgagacagggtcttgctctgttgcccgggctggagtgcgatggcatgctctctgctcactgcaacctccgccttctgggttcaagtgattctcctacctcagcctctcaggtagctgggattacaggcatgcgccaccatgcctggctgactttttgcatttttagtagagacgaggttttgccatgttggtcaagctggtcgaaaactcctgacctcaagtgatctgcccgcctcagcccgccaaagtgctgggattacaggtgcgaaccatcttgcccggcccaacgctctggattttaaaaaagtattacctgtgtttcgacgctttctatatatagaaaccatatctgactgccttttacagcagccagcagagtgttcacaagaccgtcggtaatgaacagaacacaggttttgaaacttttcgatgactggttatggtttaagttgactgttataaatgtgatggtttaacttaatacatgaatgtaatcctcagttattaaacaagtgggcacatcttactatttaatgccttgaaccagaagttcagctgaaaatttaagtatttcctttggtagttttgaaggttggtatcatacataaacaattcctgtgatactaatgagccatcacccctctacttttttttttttaaatcaaggagaataaacttaacacccttaaagacggacactccaccaagttctgtaccaaccagtgtgatttccaccccttctacagaagaaattcagtcaggtaagtaatattgttactggtttaatataatgaaaggtagagtatcttttcttttgttcttttggaaattaatgccgcctaattttaagtcagttctgagacagcagggatgcatcttattggaaccattgtttaaacccgccggctgcctgtttacgcctcagcagggggcacctggccagtgagagcatcctggtgagccagggagtgggttcagcaggagattgtctagctcaggtttctccacctgatgactgctgaccttgtgggccaggcaattctttgttgtggaggactgtcctgtgtattatgcgatgtttaacagcatccccggctgctacttcttgcccatgacattctttttttttttttcttttttttgagatgcagtcttgctctgtcgcccaggctggaatgcagtggcacgatttcggctcactgcagcctccacctcccacgttcaagcaattctcctgcctcggcctcccgagtagccgggactacaggcgtgcgccatcacacccgggtaatttttgtatttttagtagagtcgggggtttcaccacgttggccaggctggtcttgaactcctggcctcaaatgatccacccgcctcagcctcccaaagtgctgcgattacaggcgtgagccaccgcgcccagcttgcccatgacattcaaaaatgccactagacattgcccactgtcccttgagaggcaaaatcgcccctggttgagagccactctatagaacttccattatatcagtataggatcttgccaggcagctcagttccgtgtcttggctctgtattctgtaaatgtcagcccttgacttccagaattcttcatttacttgccaaccttatgtttgttaatgttgcagagacgcctggagacgctcagggcagtcccccagagctaaagcggcccagactcgatgaaaacaaaggaggcacggaaagtctggacccttgatgggacctcggcttctgctcgaagcctaccaggctcccggtgtgtgcagggagacggtaaagctggaggtgcctgagaccagggcttccatggagcgggacacactgtaaatggatttctataacagaagtgacatgtgtactgatttttctccagaaatatggatgctgttgtattcagtatccatttttaacttgggacatgaacgttttaacgtagtaaatcctctttttgatgagtttctgaaactggagcggttcaacgttatccagtgtgaaaatcagtgagtcctccctggcatcctcgtgaaagtgcacacacttcatggagggactccttttcaataagaattaggaagatgagaaagtaatttgagattttactctgtcgaattttagagtatttgaagtgattgttagatttcacttctaaggagttgattgattaaactttggaaggtagttgtgtttgttttctgattttaaaggtgacgatgcttattcttttagtaactaagtgaagtgaaaaagatgggtatcacccatcatcttcccaccagaagtaaccctcgttaatgttgtagtatatttccttagcatttttgtggatctatttattctaaaaagagaattgagattttatttcatatgcaatttggtatctaaataggttagttttttagattggtttttcaaagcaaaaaaagtatcttttttgttttttgagacagggtcttgctctgttgcccaggctggagtgcagtggcgctatctcagctcactgcagcctcgacctcctgggctcgagcgatccttccacctcagcttcccgagtagctgggactacaggcatgtgccaccatgccatgctaatttcacacacacatgcacccacacacacacatatatatgatacatatatatatatatacacacacacacaagtatgtgtgtatatatatattttttttcttttttttttgagatggagtctcactctgtcgcccaggctggagtacagtggcacaatctcggctcactataacctccgcctcctgggttcaaacgattctcctgcctctgcctcttgagtagctaggattacaggtgtgtgccaccacatccggctaatttttatatttttagtagagatggggttttgccatgttggccaagctggtctctaactcctgacctcagatgatctgcctgcctcggcctcccaaagtgttgggattacaggtgtgagctactgcacctggcctaattattatatttttaggggagacggggtttttccatgttgcccaggctggtctcgaactcctggggctcaagtaatcctccctccccagcctcccaaagtgttgggattacaggcgtgagacaccatgcctggtcaaatggtatctgttttgacgggtggttctcaactgtagctgcatactgaaatcacctaagagctgacataccagtgcctgggttcccgcttcggaggatttggcctaatcggtctggggtatgttctgaatattaggatttcttaaagctcctggagtaattctgatgcgcagccaagattgagaaatctaagggaaaaaactttccctggatacggtctgttctggttaaatgcatttccactgaaagcatttttttttttttccgagacagagtctcgctctgtcacccaggctggagtgcagtggcgcaatctccactcactgcaacctcacctcctaggttcaagggattctcctgcctcagcctctccagtagctgggattacaggcacccgccaccacgcccggctaatttttgtatttttagtagagatggtgtttcaccatgttggtcaggctggtctccaacgcctgacctcgtgatctgcccacctcagcctcccaaagtgctgggattacaggcgtgagccaccgcgcccagccgaaagcattttcttgattatctctgccccgtcactgattgacatcctcctttgctggggccgcggactgaaggacagtatgcaggaggtgccatcagctcttctgaaaagagacagctttcagtgtcatgtggctggcgtgaggtgcggtttgcagttgttgatcctgtgcagacagatgaatgaccatgggtcccctgtccttattgagcagcctgcttcctggccatacctggggaggaacagtattaggtttttctgggtgtggtggctcacacctgtaatcccagcactttgggaggccaaggtgggtggatcacttgaggttgggagtttgagaccagcctggccaacatggtggaaccccatctctactaaaaatacaaaaactagccaggcgcggtggcacacacttgtaatcccagctactcgggaggctgaggcacaagaatcgcttgaacccgggaggcggagtttgtagtgagctgagatggtgccactgtactccagcctgggcgacagagcgagactctgtctcaaaaaaaaaaaaaaagagaaaaagaagaacagtattaggttttacaaatctgtttcttgtgcattgattgtgggagttggggtgggggacccctgatggcctgcctgttctcagccatcatccttaaatataaatcaaaattggcaataaaagaccaagtgaagtcacttcagtgtcatagtctaaaactgcctgcaaccatctgggcagtgtattgggaaagcttttgcaaagggagcccagcctgaaggttgggcaggcttccaccttacagtggctgctgggttgaagatccttctcatggttctggatctgtacttggaggggtcgttgtttctgttttgagcagtatttccagatgtctctagcaactctactgttgaatattagttcctgctgctgggggtgcctagaagaaaatcagtctcaggcttggggagactgcttgggagaacttgacctgacttccctggaatctgggattgtgaggataggtcggcgtttgaaggaagaaagttggaggctcagcgtgggcagcagagggtgaagccttcattttatgcagtggcccgtacggtggacaggggtatgcggtgcctcctcgggttatcgtggataacgggcccagccatcctcagcaagtgcccacagggccagggccctctagcagagaggggcaggaggatgtgccacggggcaggggagaaagtctcctggggtcctcgtttactccagtttcctcccttatatccacttccgtcgtctttgctgaaagcacatctgtgtaacgatgcccttggccctccttacctaaatagttgtcagcgttcacttaaacaacataggttccaagtccttggctctggaaacatcaaatggggagagggaggaggtggaggatgagctgctccagccccttcttccctggtctggggtctcccaggacttctgcagcctccctggttattaagctacagttcaaccttgggtgtgtgtgtaggacagacagacttggacaaattacttcatgggtctgtgcctgtttcttcatcagaaaaagtctctacagctagaaaaccttggactttgtttgctttggtaggggagaggggtaagagaaaatgtaggggggggtcacccacagagaaacgagagactgagttaatgcagctggaagctgagccagattgtacttcccttgcctggcatattgaagtaacacacttgttttcatgcacaaattctcagtggccactgggggtcactgtccccactgaatccactcagcagtcctgcttccttaggcctgaaggtcccatgtctccgccccacctcctctaagtgatccgcgcccctgtccggtcttgggaacagagtggccttagataccggcttccgccccgatggccagacccagagtggaacactgttgagcagacaggggtgggagaggatgatgaaagcagtatgtgcatggccatgcctttgttcattcattcattcattcattcattcattcattcaagaaatgtctatcaaatatcctctgggtaccagaggacacctcaggaacaaaccagacaaaagccaccaccctcttggggcctacatcctggcttggggagaccaacataagtaaatacagggaaaacagagtggtgaggcgccctgggagagctgggttggagactgggttgtagcctggagtgagaagggccgagccgagaaggtcgagaggcaacgcaagagagaacggaaagtgatcggatggggcgttctagatttttctaggagcaggatatccttgtcatctagggtacccggtgtgttctctgggcaggctgggtgttttggggtcccccactgcttccccacttggcatgaatccccattttgtctggagttgccctgttcgtcacccggcctccctgtcaccctccccttgggagtcgaccccacgcctgcctgtgcgcagcctctggggatgcagttgggtggtcctccgtctctggcctggcccttttgtcccagatcgaaggcagaaccacgtgtcatctagctgttaccttccatgtcctgcttttagcaaattctgtggtggttttaagcactcagttgtgagaggtggtggttgtggagggcactttcttctgctggcccctgtaccttatgtcctgccttagcgtagacaaggtcagcatggaggggaaaatatttccactgatgtgggtcccctgcagagagggctgtttttccctcaagtttcagttctgagtgatggcgtgaagcaacaggtgttgcccctttcaaagagtctgtaacaaatttgtagcaatgattatacagagggggtaatagactggcccttttttcttcttttgagataggggttcattgttgcccaggctggagtgcagtggtaccatcttggcttactgcagcctccagggtcaaacaatcctcctgcctcagtctcccgagtatctgggactataggcatgcaccaccatgctcatttttaaattttttcttttgtagatctcattcctggggtctcactatgttacccaggctggttttgaactcctggcttcaagcgatcctcccaccttagcctcccaagtgctggtatttttttttttttttttttttttttgagatggagtcccgctctgttgcccaggctggagtgcagtggcgtgatctcggctcactgcaacctccgccctccgagttcaggtggttctcctgcctcagcctcccaagtacctggcgcctgccaccgtgcctggctaatttttgtatttttagtagagacggggtttcaccatgttggtcaggctggtctcgaactccttaccttgtgatccacccgccttggcctcccaaagtgctgggattacaggcgtgaaccaccgtacccggccagcctctgttttcttaatacccagaacaacctgatgtctccttccgtcatcaaatattatctataaaagccatttcaagtgtcatcacagattctttctttgaaatcactctggtctctgttcctggtcagagcccttggtgagtctgtatagtctgggatgaagtgagggctggtgtcagcccctcctgctccaggtcttctcttccctcgagttcctccttgtctcctccggccctctgagtctgtggagctggctgtgctcaaaagcaaaacaaaagaacatcacctcaagcctgggctttgtccagatccggagtcagcctctgcaagtgagccggacacatgcaatttccaaagctcaggagactccaggccctcagcgtagggaacccccgatgggggagattgggaagtctggaaaatttgaaggggaatggaatacttggagctcagccatttcatgacaagcatccatattccacgacccaagaggctgagtgttggggaaaagtcaccccccatgccggtgtcattctgctttcacgtgacagttacaggaaggagtaaatgccctgtgactgccgccacccccaaagcaaggaactcgggttcctaacaggccgggcacttgcggaagccactagggggcggtattgctaatccttctctcctacttgccccaaagagtcctgtccctgtctccttcccgggcccaggtctcttgtccctgctctctgtggggctctgctgttggaaactgctgtgaattccctggcggccccttatcagataggcagctgttcccgtgactgtcccatccagagtccgaccatgcctccaggactgacatgtctgctggttgtcgttgacaccagaggcatttgagttgtttgtccttttgatttccacagaatcctcgatattcaaggccgccttagacgtggcctgtctcctaatccttgatgtcactgggccactgccccgccacattgcctggctggccaggtggcctgcccaccccctagcagcagctctctccccacggcccctgcaccagaggtgcgttttgatcgcctcctttccaccctgttggtgagggagggattcccacactggggtttcgggatggtcaaacacagcatccaacacgggacacctgaggtgcacagctgtttgctagtcgcatcactcacagcttgggagggggagtactccgtccaggcagggccacacggggcagcactcgagggcagagtgaaccgcaggggtggtgggcagccggctttgcagtaacaagaggacggggtccccctggttcccacaggaggatgtgatgggctcatgtgactaattcctggggtggttgggaagtgaagcctgctgctcagggataaacaggagatgcgcctggggccatgataaggcccggctggagagtggggaggggagcttgcagttaagccattcaaggcccttccagttttagaggccaggcagcacctaatattagcgttagaccttaaaccaggcgggtgggtggaaggctggcaagggagttgtccttgttggtggcaggggaccttaggccagcgagccaagtgactgtcagcttctcccccaagttggggctgccggagtgtgtgggatggtgagaaagggggtgtgggaggtgagagtggaaaaccatggactttggagctagaagaggggcttagttctgtcttaagcaataaattgccgtgggtctttgcacatttcacttcaccgaccttggcctccattttcctctctgtaaaatggggatgcagcatatgcctgacggtgtttgaaaggattacctgagacaggtagcttcctctttttttttttttgagacggagtcttgctctgttgcccaggctggagtgcggtggctcgatctcagctcactgtaacctccacctgctgggttcaagcaattctcctgcctcagcctcccgagtagctgggattacagacgcatgccaccatgcctggctaatttttgtgtttttagtagagacagcctttcaccacattggccaggctggtctccaactcctgacctcgtgatctgcccacctcggcctcccaaagtgccaggattacaggcgtgagccaccgcacccggcctagcttcctcttaagttgagagttctgttttctcacaagagaaatgtagatttctggagagatacttaaccactatcagtcacggttctacaggatgtgtgtagagagatttactctaaggaacaggcccatgcgattgttggggctgacaaatccaaatcaacagcgtggactggcagcctggagacccctgagagccagcagtgcagaggaaggccaaggccatctgctggagagtcccctcttgctcagggaaggtcaacttttgttctagtcagtgcttcaacagattgagtgaggcccacccacattataaagggcaatctgcttcctcagagttcatgaatctaagtgttaatttctccaaaacactctccaagttgacacacaaaatcaacctgcacccaggccagcactaggaattgggaattgagaacgtgtgtggcctggtgggctgaccaacagtctagactccaaacagccgtgggtctggatccttaatccgtggctaacctggcctcccagacatttagtacaataccctctctccctccaaattttctcatctacaaaatgagaatactctgaggatatcaatcaaatatcatactctgataacctctcataacaattcaggaactattcaaacagggttaagctggttccttccctgtgagcaggaacaacccaaagaatttgtgagttaatacgtagctgaatccagcacaacacaggttctcagccatcacatggtttaaaggctacagactcccagccagtgtgcccgggcttggatcctggctctgccaattgctgtgtgaccaagggtgtgttgcttaacctcgctgagccttgcttttttcatctgtaaaatgacacgacagagagccctgggctcgaggccttgcagtgcagattaaatgagagaccctgtgtggagtgcctggtgttggtgtcccttgtggtgagcctcagaacccgtcagccagggctactcctttccagaccccgtcactgtcgccactgaccccctcatgggcacacatgctacaggggtttcagtccaaaccaatgcttttgggccccagctcatattgctcttcctagtagaccttgccctgtcaaaagctatcaaattaacatctcaaaagccctccatggacgcagtgacgagagcctgtggtcccagctactcaggaggctgagcccaggagttcaaggctgcagtgagctatggtcatgccactgcgctcaaacttgggcaacatagtgagactccatttctttaaaaaaaaaaaaaagccctttgctcttgggtttcttgctattgagaagcagatgttgggaagaaagtcccctttgggggacggtgggattcgtactgttcaccaacaaaggagcagctgcctatggtgggctggtggccctggaccaccctgagggatgagtgagatgcacattctcaagctgcagtcattacaccatcccccgacccaccacggctggctttgacacccaccagagaagcccaggccagagcagcctccaggggagctgactcaggcagggtgggagccgtgaaccagaggcagctgcagaaacgtccagtgatgtaaggcggacgaggctgctatgtgtggcacggcttctacagctgacaatgctgagtgaggctctcatgcacacagttgcaaaaaggcctttaaaacagccactatgtagaaacaagcatttaaaaaacacagcaagcctggctcatgcctataatctcagcactttgggaggccaaggcaggtgggtggatcatttgaggtcaggagttcaagaccatcctgggcaacatggtgaaaccccatttgtactaaaaatacaaaaaagttagccaggtgtgatggcacccgcctgtaatcccagctacttgggaggctgaggcaggagaatcacttgaacccaggaggcagaggttgcagtgagccgagatcgtgccactacaatccagcctgggcaacagagtaagactctgtcttaaaaacaaacaaacaaaaaacagagcaagattctatccaccaagccagtgtgaaatggaatactggagctcatgtgtattagtttctagggctgccataatacttcgtcaagagtggcttgaaacaacagaaatgtattctgtcagttctggaggccagaagtcctaagtcaaggggtcggcagggccccacaccttccaaaggctgcaggggagaatccttccttgcctcctccagctcctgccggcttctggtcttccctggcttgcagccacgtcactccaacctctgcctccatcttcacgtggccttctcctgtcttcccatctttttctttcccttctcttctaagtacacttgccattggctttagagtccaccctaattcaggatgatatctcaagattcttttttctttattttttttgagatggagccttgctctgtcacccagcctggagtgcagtggcatgatcttggctcactgcaacctccgcctcctgggttcaagtgattcttctgcctcagcctcccgagtagctgggattacaggtgttcaccaccacacctggctaattttttatatttttggtagagatggggttacaccatgttgaccaggctggtcttgaactcctgacctcaggtgatccacctgctttgccctctcaaattgctgggattacagttgtgagcctctgtgcccggcctcaagataattcccacgtgtcatgggagggacctggtgggaggtaattgaatcatggtggcaggttgttcctgtgctgttgtcatgatagtgaataagtctcatgagatctgatggttttataaagggcagttcccctgcacatgctgtcttacctactgccatgtaagacgtgactttgcttctcctttgccttctgccatgattgtgaggcctccccacccatgtggaactgtgagttaattaaacctctttttctttataaattactcagtcttaggtatttcttcatagcagtatgaaaatggacgaatacacgaattatatttgcaaagatgtgatttccaaattaggtcacattcttaggtttcgggtggacacaaaatttggagggacaggattcaaccctctacactataccatgagataggcctgtgaagagggctggctggaagatggacagcagtttcacaacatatagtggctaatcccaagccaggaagaaaccactgtaattgcagaaatgcagcatgtccttggaactgtcctcatctggctaggcatggcccctctgaaggttcctttgccttggctggtggtggctggaggagaggaggcgatggcgtgtgggcagccagaggggctgctgaagttagccgcacggcaccagcattagctcccagatcctcacacagttcttggaggtatgaggaaaccgaggcacagggagcataagaaacttgctcatagtcttaaacttgcaggtagtaactgactgggagctagctggctccaaagcctgtggtcccacccactctgatacctggctggaatcccatctttacctggggaacgtgggaacatagcgagccagaacctgggtttcccagggcataggagaagctccaggagctcaagtgaagctggaccaaactcactccatccctcctcgaggatggatttttctttcactagtaaaagggtgaaaagatgcactttgggagggtgaagtgggaggatcacttggtcccaggagtttgagatcagcctgggcaacatagcaagaccccatctcaaaaaaaaaaaaaagaatgaaaagacttgccacctgacagtccggtgaaggtggcaggcatctggcttatcttttctgagctcagctctaccatgagaggttggactgggtcactccaacccacaggggaccatggagacagcttgtgagagagccctagagtagaagggaagatgagggattttgaggtggaggcttcagtgaaagggaaaaggatttctgggcttgactgtggtccccaccccatgcagcaggtggtcccagaaggccgcaatggacaacaggggtaggggagtcacaggagagtggacctatttttattttatttattttattttatttatttatttttttgagacagagtcttgctctgtcgccaggctggagtgcacaggtgcgatcttggctcactgcaacctccacctcccgggttcaagcaattctcctgcctcagcctcctgagtagctgggattacaggcgtgcaccaccacgctcagctaatttttgtatttttagtagagacggggtttcaccatgttggccaggctggtctcgaactcctgacctcaagtgacccacccgcctcggcctcccaaagtgctgagattacaggtgtgagccaccacgcctgggctatttttattttttaatttttttgagatggagtcttgctctgttgcccaggctggagtgcagtggcataatctcagctcactgcaacctccacctcctgggttcaagggattctcatgcctcacccccccccacccccaaatagctgggattacagacgcatcccaccacacccagctaatttttgtatttttagtagagatcaccatgttggctaggctggtctcgaactcctgacctcaggtgacctgcccaccttggcctctcaaactgttcggattacaggtgtgagccaccgtgcccagccggacctatttttaaaagcatgtttatataaggctgacttgagggatgacatttaagccagtagaggcttgaaatacaaagagaagtggaggcgggcatttcaggcacaggaaatagccagaaggccttgaaatgggaagacctggcctatttgaggaacagacagacagacactcgtgtggctggagctttgtgcggcagcaggcagagagtgtgtgctgaggacagacgggagtcgagtgtattcacagcacacaggggactcctcatctgcattttagaaagagctctctggatgccatgtgggcaatgaactgtggacagaatcctagccaggcagtgactgcaatagtccagacagcggggacggacctgggccagatgctggcttgcagggtggagggataggcgcatttgaggggtgttttggagctcaagatggcagtcatgactttgctgatgatgtgaaattttaggactgtgttattggagaggccttagagatttgaattttacagccagaagcagccaacccagtgggattgcccatgtctgcccagtttccctgaactccccttctgggtgaagaagggacggcggcctgggaagggtaggtgcttgtgttgatctgtccaaggagcagacaccaaattcgctttcaaggaagtggagcccagggctgggctattttcctcttttccacaagggacacttttcacataacccaccctccttccaacacagggataccgttcactccatcgtgcttcgtctcactcagcctcagcttgaagccctctggcaacggggagctcatcactttgtgagctcagccctagacacttttcccagtcagccctaggcaggcacctcctccacatgtggaatcaaaacccagctctttggtcaggcgcggtggcgcacgcctgtaatcccagcactttggggggccagggcaggcagactgcttgagcccaggagttcaagaccagcctggacaacatggtgaaaccctgtctctacaaattacaaaaaattagccagatgtggtggcacgtgcctgtagtcccagcttctcaggaggctaaggtgggaggatcatctgagcccagcgaggttgaggctgcagtgagccgagatcgcaccactgtgctgcagcctgggcaacagagtgagaacaaaaccccagctctaggtgtgccctcggcccctccaggcagcctgtgtcctctccccaggatttaagatcatgccgctcttgttttgggctttttcaggacagttaactcttaggaagaagggacctccaaacctctaagtcgccaaaccaccgcaccgccctgggtggaagaaaccgcttcggcagcagaggaaacagcagcttcgcagagcagcctggcccgagtggctacaccgggtctgtctggtctcagctctggcctctgagtcattagcgttgttttcttctgaggccagggcttcagattagtcaggggctcctgtttcctggctgataaagcaggtggaagaaacacaatctggccgcctagaggctgcgtgaagctcgtgaccctgcggggtgactaacggagctcagctgggtgggaccagaaaccacgtctgggcactcctgagtcacaggctcagaagctttcgcctccgccttcagactggccctcaggcttccctgctcagaggcagggaattgtgcagctggagtttcattttccaaggtaacgtagggtttttatactgtgctaaatgagagaatgggaaatggagcctgggttgagatgcccacagtgtaacacaagcctgcggcgggggagtcggtttctctgggcgagtacttttttttttttttctttgagacatagtctcactctttcgcccaggctccagtgcagtggtaccatctcggctcgctgcagcctcgacagcccgggctcaagcaatcctcccacctcagccccacaaatagctgggactacaggcatgtgccactacacctggctaatttttgtattttttgtagagatggggtttcactgtgttgctggatcaaatgctgtaaagggttgaattatgtactcccaaaaagatacttgaagtcctaaccaccagtacctcagcatgtaatgttatttggaaataaggagggtctttacagatgtaatcaacttaaaatgtcacaccctaaagcagtatgacttgtgtccttctaaaacagggagatgtggacacacgtagacatgtatggagggaggatgttgtggacacccagggagaaggtggcaccaacaagccaggtacgccaaaagctgggagagcctggaacagatccttcccttgtggaaggagccaactcagccaagaccttgatatcggttttgttttgttttgtttctcaagacggagtctggctctgttgcccatgctggagtgcaatggtgtgatctcatctcactgcaacctccaccctccaggttcaagcaattctcctgcctcagccttctgagtagctgggattacaggcacctgccaccacacctgggtagttttttgtatttttagtagagacagggtttcaccatgttggccaggctggtctccaactcctgacctcaagtgatctgcctgccttggcctcccaaagtggtgggattacaggcatgatccattgtgcctgccaagaccttgattttggacttcccacctgcagaactgggagacagcatgtttctttgtctaagccactaagtttgtggtgctttgttacggcagtcctaagaaaccaattctgtttaggattttgaggaactgccaaatcacttccctccacagctgcaccactttcattcccaccaacaatgtaagaggccaccaatttctccacatccccgtcaaaacctgctattttccatttatttatttatttatattttgagtcggcatcttgctctgtcgcccaggctggagtgcagtggtgcgatcttggctcactgcatcctctgcctcccaggttcaagtgattctcctgcctcaccctcccaagtagctgggattacaggcgcctgccaccacgcccggctgatttttgtctatttagtagaattggggttttgccatgttggcccggctgatgttgaactcttgacctcaagtgatccactcgcgtcagcctcccaaagtgctgggattacagacgtaagctaccatgcccagccttccttaaaaaaaattttaaaaatcgctgtcctagtaagcatggggtgggatctcactgtgtcttgacttgcatttccctagtgagtgcagtgctgagcatcttcactggccatctgtacgtcttctcttatttcttattttttttttatttttttgtgatagtctcgctcagtcgcccaggctggagtgcagtggtgtgatctcggctcgatgcaacctccacctcccaggttcaagtgactctcctgccccagcctcctgaatagctgggactacaggcacccgccaccacgcccagctaattttttgtatttttagtagagacgggggttcactgtgttagccaggatggtctcgatctcctgacctcatgatccgcctgcctcagcctcccaaagtgctgggactacaggtgtgagccaccacacctggcccctcttcctcttatttgtatttaagtccccagtgcacagcgccctgtctggtttgctcagtcactctgtttggatgtgtgagtggatggaaagccctggccttgggcttccccaccgctttcattcagtgtagccggttcattaggaacgttacagcagccccatcccattgcttctcagtgggcttagaataaacctgaattcctgacacagtcgtcatggtggctcccccgctccccacccacttcacttcttactattcccctctcatgatcaagggagaccatgaaatatagtgtgcacatggggatatttttgaaagatacacgaggacaacagacatccactgggactgtcttaagtacaccaggaggggaggtcagcctggccattgctctcagccacactggccctagtctgtccttgagcgtatcagctcttgcccgtgtggggctttgcacaggctgccctggagcctggatggctgttctcttgcttttctcccttctggctctttcctggcctgcgggtttcacctccagcgtctccttctcaggatgcctctgccaacatgcctgtctaggggagtcctactctgtcaccctctcactactccttgcctattttttttcatagcatggatcacagtttaggatgatcagttcattgcttacctgctttttgtctgcttactctagactatttattttttatttgaaacggaatggaaccagcatgttgcccagtgcctgacaaagttagatgacaaatcaatagctgttgaagggatgagttactcataatggtaagaaaggcactgtcgtgtggctgtacagatgacagctgggaactgatcaaacttgtctgaagatccacattctgtgaagagcaaactcgcaagctggaaaatattaaaccaatgagcaacgtttggctctcaaattgtactttaaccagggcatgggttggaatcattgtcaatggtggtcatttctcccttaagctgttgtgaaaatgggtttttacagctcctggcttctttcttgtagttactcatccccccccactgccattcactaccacccccacaatccacctgacacctacccatccacccacccacccaccattccaaccaatgtccacacactgtgcaccgtctgcctaccatctaacctcccaccccctcccacacccatgaagccagcacacacccacccatccgtggcacttgggcgtggttgtgtggccccacaggaggctgagtattgccagtggggggagtggttggcttaggggagctccccttcaaagtgtccaaagatgaaggttatatgtgaataaaacaatgaggagagatacctgagatttctgtccagacctggtgatttggggacacaggaaggcccagccacagaggcagatatggttattccaaagatcagcctgtgcctctatctgcctggacccagtggttctgtgcttgacaatctcccacccaaggggagagtcgtagggtgtcagaaagggcctcgaggacgctgctgctttcacatgcagcccttgcttcttttttttttttgagacggagtctcgatctgtcacccaggctggagtgcagtggtgtaatctcggctcactgtaacttccacctctggggttcaagcgattctccagcctcagcctcctgagtagctggtattacaggcacacaacaccacgcctggctaatttttgtatttttagtagagacggggttttaccatgttggtcaggctggtctcaaactcctgacctcgtgatctgcctgcctcggcctcccaaagtgccaggattacaggcatgagccaccacccggccagcccttgcttctttcttgccaccagaagatgaaagagaaagtgtttggagccatagaatgttgagcgttaccagggccttcagctccagccaatccctcctttgcagaggaggaagcctgggccaggggctactgttaccagggccaaccttagagaggatgcgattctgttgtttcatgggacgtccccttctctaactctgtagtctttgggagatcaccatgcctgcatgccatttagctggcagtaaacagggttactttctttgtgtcttttaaagttttaaacgcttgctacagactagggaattctttgtgtcttaaacacaagggtgctaacatctattgaagaagtcacaccaatgttgtctggggttttaatttacactggcttatcttatgcctggagagccccttctggaaaagtttgcagtcaaagggaagccagagccctagttcaagggagggaggttgctgagaattagccaggtggtttaagcacccggcaagcctcagtaatggagcgtgatgtataaccctgggctctccctgcagcctctcggcatatcactcacaccttctaggctgtcctgttgagacttgtgcctgctcctgcagagcgctggggcctctgaatgttatttctcctgcctgacaaatccagactttcccaaattcaaaagcacacctcaaaagagagattactttatcgatgccctggcaagtacattttccacccccaccatcctgccaagtcccccatattctgctatggatttggcttttcacagacttatttatttagtccatttagaaaaactgtacctttggagataaaaggtagtgtaaagagaggaaataacagtgggaatacagaaaaaaacaaaaggcagtgaccagcatgcgttaaaagtcaataaaatgcggccaggtgcagtgactcacgcctgcaatcccagcactttgggaagccaaggcaggcggatcacttgaggtcaggagttcaagaccagcctggccaaaatggtgaaaccctgtctctactaaaaatacaaaaatcagccaggcatgatggggggcgcctgtaatcccagttactctggaggctgaggtgagagaattgcttgaacccgggaggcggaggttacagtgagtcaagatcacaccattgcactccagcctgggcaacagagcgagactctgtctcagggaagaaaaaaaaaaacaataaaatgcctatttgaaagggttcttctttggttctcttgtaatggattgactgagactcccctctccgcagtgctaatgctcaaagggaaaagtgtctttacaagcaggccccatttgcagtgatattccagaaggcagatgccccggcctggctatgtgtatgtctgtgcttcctggccagctgcagttgaggcttctcctgcatgcatctgttattggtccccagttttctagcgtggggatcagaagtggtatcaactgttagagggttggggcaactcttagaattatgaattttcagccaggcactgtggctcatgcctgtaatcccagcactttgggaggctgaggcgggtggatcacctgaggtcaggagttccagaccagcctggccaacatgatgaaaccctgtctctacgaaaaatacaaaaattagccaggtgtggtgacagacgcctgtaatcccagctactcgggaggctgggacacaagaatggcttgaacctgggacacaagaatggcttgaacctgggaggcggaggttgcagtgagcctagattgtgccactgcactccagcctgagcgacacagcaggactccatctcaaaaaaaaaaaaagaattatgaattttctttttttttcttttaaaagtcattcttggccaggtgtggtggctcacgcctgttatcccaacactttgggaggccaaggcgggcagatcacctgagagatcaggagttcaagatcagcctggccaacatggtgaaaccccatctctgctaaaatacaaaaattatctgggcatgatggtgcacgcctatagtcccagctacttgagaggatgaggcacgagaatcacttgaacccaggaggtggaagttgcagcgagccgagatccaagatggcaccactgtactccagcctgggcaacagaacgagactccatctcaaaaaaaaaaaaaaaaaaaaaaatcattctttgccagaccaacaattcaggcaggttacggcaacaggagaggatcccacagcttgctgagctttggggtcatctataaatctgtttgctgctaattttcctggcactttggtaggtcaaggccggcagagaccagactggccaacacgacgaaaccccgttctactaaaaatacaaaacaaattagctgggtatggtggcatatacctgtaatcccagcttcttaggaggctgaggcaggagaaatgcttgaaccagggaggcagagattgcagtgagccgagatcaccccgctgcactccagcctaggcaacagaacgagactctgtcaaaaaaaaaaaaaattagaaggagccagaagctagacctggaatgcagtaatgtcaagacagctaatattggtctcctggacaaataataactgatcaagtaaactttaagttgtggcttaaaaatggcaccccactatgtatgtgtgtgtgtgtatatatatacacacacatatatatatacacacacacacacatatatgtatatataagtgaataccagatagttgaaagatttaaacataaactacttcatgtctgttgcctcatggtcacaaagtggctgctcacctccagcatcacgttttttaggcactgttaaaaagctgctaaaatgacttcctggaagccttggtaatttccacttacatttcactggccaagatctagctgtaagagagattgggaaaaacgaatgtctttatctgggtacattgctcaccccaaacaatactggagtttttaaaagaaaaaatgatagaagggataataggtatacaactagtagcatctgcccagtgtctcactgactaattgttgtaagatgttgggggaagagagaaacaagaatgacatctgggctctaggccccagggactgggaagccaatgacactgtctactgatttggaaacataaggttgggaaatcaatacttctcttttagccatattcagtttgagatgcctgtgagatttctgagtagagaaatcaaggagacagtggaacatgcatacctgcagctccaggatatacagatttgagagagcagcatatgaatgaaattttaaaaccatggactggatgacatcaccaggcagagaagaggagaaagtctaggacaggctggatacagtggctcatgcctgtaatcccagcactttgagaggcagaggtgggtggatcacctgaggtcaggagttcaagaccagcctaaccaacatggcgaaaccctggttctactaaaaatacaaaaattagtcgggcatggtggcgggcacctgtaatcccagctacttgaacctgggaggcagaggttgcagtgagccaagatcgtgcctctgcactccagcctgggcgataagagtgaaactctgtctcaaaaaaaaaaaaaaaaggtcaggacagagacctgggtctggagggaggaagagcaaacgaagagattgcaccagaacctgcagtgttcccccaagccccaggaggaaggtttccaggatgaagaagtggtcaaatatgtgacttggctgctgccactgtgagtaagataaggatagaaaaccagctggtggttttggcaaaatacgggccattcgtgtccttgataagaacttttactcactgtctggtggacgtagccactcccttaatgatgcacacttgacttgtctttttttttttttttttttgaccccccagatcccatagactgagagttgtatcttgttttctctgcttttttgctaatgaaggcaatgctacaatgagaatcttgtgcatatatgtttgcaaacctgtgaaagtatttcttttggataaggcctagaaaccattgagtcaaaaagtatgcatatgttaaattgtaatccatatcatcagatgtctactaaatagttataccgatttacattcccaccagcagtgtttttgagttttagtttcacataaaattgtatctttgctaatctggtagttgaaaactcttgttaacttcatttgaacttcttttttttccattggatatttgcattcatatttttccccatgtttcttttcagttattcttttttcttttcttttcttttttttttttttttttttgagacggagtcttactctttcatcaggctggagtgcagtggcgtgatctcggctcactacaacctccacctgccgagttcaagcgattctcctgcctcagcctcctgagtagctgggaatacaggcacctgccaccacgctcagctaatttttgtattttcagtagagacggggtttcactatgttggccaggatggtctggatctcttgacctcgtgatccgcctgcctcggcctcccaaagtgctgggattactgacgtgagccaccgcgcctggctcttttttcttgttgatttatcagagctcatatatatacatatatatttatatatacacatacacatatataatttttttccagtttatggttaccttttgatttttaagtggtttttcttgccaactttaaattctgtatttattacatagttaaatttgtcagttttgttcttttttgcttggaaaggccttcatcaccccaatattataaaaatattcattttcttctatgttttatagtttctttttaagatcgaatatttgatctctatagagttattctggtatcagaagagaggttgaaagccaggctttattttccaagtggttagccagctgtttcaacaccatttcttcaacaatttatttttccccaatcaatttaaaatgccactcttattattcaatgaatatccacatattggtggctccatttctgaattattttttgttccatgagtctacctatgaatttgtctactgctgtaccagtaccatactgttttaatcactgtagctttatgtgtcggttaggaagcctttctgttgccagtgctggaaaatccatcttaaactggtttacgcacagggcaatgtattgactcaaataaatgaaaagaccgggagtgctgaaagtcaccaggatcctttctttttccgtcacttgactttgctcccaaactacgccagagcccgtctctttgaaggttcaagtccagctgcctctctctggctgctgcacgagccctgttggctcttatgggcattaatgggatcacaggcacatcctggggcaggcctgagtcaatgccagggtggagtcagcttcacccaaagtacttgggctaagagggaaaatggggtcccacgcaaggaaagtgggtgtgtcaccggaatggaaggtaagagccagtagtagctgggcagtgagaccaaaggatgtcttccattagtgaatcactgtcggtcccctgcagaccatgcgtcccttgtttctcctcatttccataaattccctggttattctcatgtgttaatttttttttttttttttgagatggagtttcgcttttgttgtccaggctggagtgcaatggcacaatctcggctcgctgcaacctctgcctcctgggttcaagtgattctcctgactcagcctcccaggtagctgggattacaggtgcctgccatcacacctggctaatttttgtattttagtagagacgaggtttcacaatgttggtcaggctggtcttgaactcctgacctcagctgatccacccaccttggcctcccaaagtgctgggattacaggcgtgagccaccacgcccaacctctcatgtgttaattcttacatttgaattcagaaaataattttttcaagttctaaaagagaaaaatgaaagcttatatttgattgcattggatttatagactgatctcagggaaaaggacgcccttacagtactgagcgtattgagtcatcctatccaaacgcatgggctactaaaaatacaaaacttagctgggtgtggtggtggatgcctgtagtcccagctcctcaggaggctgaggcaggagaatcatttgaacccgggagacagaggttgcagccagccgagattgcgccactgcactccagcctggacaacaagagtgaaactccatctcaaaaaaaaaaaaaaaaaaaaaatcacgatttagttctttttgaaaaacaaagtagaaagatcacaaactcgttttatcatttttttagaaggcaggggtcgggaacacaaataataaaattaggatcaagtaagggaaataattacaagacaatatttaggcaacctgtgctagttaatggtcttctaggaaagtatgtcttactaaaattgaccacagaaaagatggaaagggttacttagtaattttggtaaaaatggaaaaagttgtcaatgaacgattcccccacaaaaaccacattcagatggtttcatggcaattctgccaactttttgttttgaatttccagcttttactttaagttcaggggtacatgtgcaggacgtgcaggtttgttacataggtaaatgtgtgccatggcagtttgctgcacagagcatcccatcacctaggtattaagcccagcatccattagctactcttcctggtcctctccctcctctcacccctcaccctcccacaggcccagtgtttgctgtccccgcccccacccccctgccatgtgtctatgtgttctcatcatttagctcccacttatgagtgagaacatgcagtatttggttttctgtttctgtgttagtttgctaaggataatggcctccagctccatccatgtccctgcaaaggacatgatcttgttcctttgtatggctgcatagtattccatggtgtaaatgtaccatattttctttatccagcatctataaggaacttaaataaatttacaagaaaaaaacaaccccattaaaaagcgggcaaagggctgagcatgatggctcgtggctgtaatcccagcactttgggaggccaaggcgggaggatcatttgaagtcaggagttcgtgaccatcctgggcaacagggcgaaaccccatctctactaaaaatacaaaaattagcaggcatggtggcatgcgcctgtaatcccagctactcaggaggccgagacaagagaatcgctggaacccaggaggcggaggttgcagtgagccaagatcatgccactgcactccagcctgggtgacagagcaagaccctgtctcaaataaataaataaataaatattgatacaaatgctaaataaaacattagaaaatagatcccataaagataaatgtacaccataaatgaatttattcaaaatccatcccagaggactcagtagttcaaaggagaaaaataatacaagcatcacaagatgagccattgagacatttgataaacttccaccgccttttctaattggaaagagaaggcaatttgtgaagaagttcttgccttctactccggtgacacacccactttatcttcccggtaccttctattccggtgacacacccactttcccttcatggcacctgtttccctctcagcccaagtactttgggtgaagctaactccactctggcattgactcaggcctgccccaggatgggcctgcgaccccattaatgccaataagagcaagtggggttcacgaagcagccaaagagaggcagctggacttgaacctgggaagagacaggctctggcttaggttgggaacaaggttgagtgacagaagttagaagttctttatgctttttttttttttttctgagaaagagttttgctcttgttgtccaggctggagggcagtggcgcaatctcggctcactgcaacctccgtctcccgggttcaaatgattctcctgcctcagcctcccgaggagttgggactacaggcatctaccactatacccagctaagttttgtatttttagtagagacggggtttccccaggttggccaggctcgtcttgaactcctgacctcaggtgatccacccgccttggcctcccaaagtgctgagatttcaggagtgagccaccgtgtccagtgataaatcatgaatttgctaacaattcttctgttttcccttctgtttcctttaagttttgtattaatttttctaagtccctcctccctgcagaatactggattcacttttgctttccgtgaagtatttaagaatataaatatcattttgccttcagctttgaccttgtcccatgaggttttgatatataatatcctcattattgtaatttcctagataggctgcagttgtagttttatttcctctttaaaatgaggaaaaacgagattttttttacatttccgataggttgagtattaattttctttttgcttcaaccttattatttttagttttattgtagcttgagaacgtggtttctatttcacttcttagaatttattgaggttttctttgtgatctaatatattgtaaaattgtgtaagtctcctattgtttttgaaaagacagtgtattctattttctctttcctttcaggacacagaattagacatacatgtacagtgtaagatcagccttgtccatcttattcagaccctctgcatcttattttttattttatttatttatttttgagacggagtcttgctctgtcgcccaggctagagtgcagtggcgcgatcccggctcactgcaagctccacctcccgggctcatgccattctcctgcctcggcctcccgagtagctgggactacaggcgcccacaaccacgcccggctaatttttgtatttttagtagagacagggtttcaccatgttagccaggaagttctcgatctcctgaacttgtgatccaccggcctcggcctcctaaagtgctgggattacaggtgtgagctaccgtgcctggtcagcctctgcatcttttttacccgcttacttgatgatagggactgagagaagtgagttaaaatatcctacactaatatgttactgtcctttgttgcagatcctgagaaatatcttttcactgtggatcatgaggttcatcataatcaagtgatcttttcatataacttactgagtttttcttgaattcagctttctcagatgtgactattatacactttctcttgctttctttttattcagggaccatcatttatttaggtaccatcatattattttgcttgtaatttgactttcagctgttctgaaccaccttgttttaatatatcagcatatatttagagttatctttttaaatgtaatgtgaggccggatgcggtggctcacgcctgtaatcccagcactttgggaggccgaggcgggcggatcacctgaggtcaggagttcataggccagtctggccaacatggcgaaaccccatggtggtgagcgcctgtaatcccagctactcgggagactgaggcagggagaagtgcttgaacctgggaggcggaggttgcagtgagccaagatggcaccattgcactccagcctgggcgacagagcgagactcagtctcaaaaaaaaaaaaaaaaaaaaaaaaacaagtaatgtgagaatttttagattttattaagcttatttgactatattataattgattacctctatctaaaactctctctgtgtatgtaattttaatactttcttgctctttctttggtttctatcttttgttatgtttttctcttctttgaattcagaaggcagatagtctttggggttctactagtgattacttgcacaactttttttttctttattctaaaaaaataaaaccgagatacatgtgcagagcgtgcaggcttgtcacataggtatccgtgtgccgtggtggtttaccacacccatcaacccatcccctaattccctcccctcaccctccacccccgacaggccccggtgtgtgatgttcccctccctgtgtccacgtgttctcattgttcgacttccacttatgagtgagtacatgaggcgtttggttttctgttcctgtgtttgtctgctgaggatgatggcttccagcttcatccatgtccctgcaagggacatgatctcattcctttttatggccggctactttcacaactttaaatagtatccttaaacctatttttcacaatgtatgaaattcagtaacataaccatccctctttattttctcatataaaagatgagaaaatgggccaggtgtggtggcttatgcctgtaatcccagcactttgggaggctggggcaggaggatcgtttaagcccaggggttcaagggtgcggttatctatgattgcaccactgcactccagcctgggtgacagagcaagctgctgtctcaaaaaaaaaaaaaaaaaaagagaaaatgtactcttggagcatctatttctccatttcctaattttatttacttgttctggagtgtttgtcctactttatatcattgtctgttgaaaataatgaaatattcctctctttcccaggaattacaatattcttgtaattagagcttctgcattacttggatgtaatttatagttaatagattcaatgctctgtgctgatttttaatcatatgacttcctcatttctaatttatttatttatttatttttaaaagagaaatgaggccttgccctcagacccaggctggtcttgaactcttgggctcaagcgaccctcctgactcagcctcccaaagtgctgggattacagtcatgagtcacctcatccagcctaagttaattattttaatcttatctttaaaatagattgtgtcttcaagtagattttttgaatcttattgaggtatacttgcagtatactaaattgcatgtatctaaaatgtacaactggatcagtttaggttcacacgcacctatgaaaccatcactgcaataaagagaatagccatttccatctgaggaaaagcaacgctctatatggaggatggacaacccagatatctaatgtaccgctaattttatagacctaaaaatacaatagaacaaagggaatagaaaaaaattaaaagcataataaaaacagaatttcctgaaatgaaggaagacataaatgtttacatcaaagaagtccttcattataataaagaactataaactctgagtgaaatttttgaaagacaagcttaaaaagaatatggcaaaaataaagttatatgctaagaaaagtagtctaacttcagatttcttctcttcttttcttttcttttagaggcagggtctcagtctgtcacccaggctggagtacagtggcaccatcttggctcactctagcctcgacctcctgggctcaagtgagcctcctacctcagtctcccaaaatgctgggattacaagcatgaaccactgtgacttgccttcttggcaattttaaatgaaagaagaagatggaataatgcctactgaggactatgtttgaggggtgttgtatgaccccgttttccatacccagccaacttgtcatgtgacaagtccacagaaagatgttatatgacaggaatctatgaactagtcttccctgaaatgtacctgactacagctaacatcatatcacatgatgaaagaccgcgttgttttcccctgaggttggcagtaagtacactcactttcaatacttctgttccccatggttctggaggttgcagacatggcaataggtaaggaaaagacataaacataggaagtgacaaaatatagagttttatgtaaatggaaccatatggtagttacctggggatgcggtggagagagggagaggttgcctaagcttgtgggtgatagaaatatttatcttcattgtcaaaaataatatgggagaaatttccctttcctgtcttcctgagcacggctggaatcatccccttagcatttactctgcaaagtggcatctcaccgtctcttctctctttagatctttagttgtttgagtggttgccttagcgtttgggaggaggacggaggctgtggtttctggaaactccggccctttggcttctctctgaatgtgttgactccgtgggaaactggctgttctgtgcatgtgggggtaacctttgtatttcagtttgtttttctgcattggtgtgaggcagtcacttcactgaggagttgagctggagttgtgccttgcagcctggcctggagacttctgttgtgtatgtgagcgcttgtttttatccaacagtcgctgcttgcctgcagctgcgaagtatgtgtgtgtctccagatctccccggttgagaagggagggcctctctgaggagtcgacatttgaggagaaacttgaatgaaggaaaggaaggagccatttggagattgtggggaagagcatgccagggagagggaacagcagataagaaagcgcagggccgtgggggcttcgtgctgtttggccaagagcctcttcctcctgtctcgctggtctgcagcgggaagagtgtccgaatgagcccactcatgcctttggctcttctaggccagcagggatttcagggttgcagggagcccttcggaacttccttctcttcctgtggcgcccctcaccgtgctcccaatcccgtgtctgtgtgcatccctggtgtggcctttctcacttacacccagccagtggtctttgatgtttatgacaagaggccgaagctcttcatattttcagatgaaatggagttttctttctcatggagctcagttatccatcgtccctttgtccttttgctcctgagaatacatgtgtctgctccatgctgcgccagcccagtcatggaactcaatgtttctgcagtttccctccgaacatttccagttgcccaaaggcattcgtggtttcacaaattttactgaaggtttagtatggagacggcagagagttgcatcttgtactccattgcaaacaatggaaaatcctccttcgatgctactctgtaggttacccctaggttacccctcagtgggtgccaccccttagagatcgctctcactctgggagtggtcagagaggagcgcagggctgtccatgtccctcccacatggctgctgcctcctccttcctgactgcagccttgggctgggagctcccgtcttcctccctggtcacagcttgggaaatcgtctcctattacatgttttaaaaattgaggtgaaattcacataacataaaattaaccatttaaaagtgtacaattcaggcgtccaacatggtgaaaccacgtctctactaaaaatataaaaaattaggtgtggtggtgcacgcctgtagtcccagctacttgggaggctgaggtgggaggatcgcttgaacccaggaggtggaggttgcagtgagccaacatcatatgactggactccagcctgggcaacagagggagactcggtctcaaaactaaataaatacataaaagtgtacaattcagtagcatttagtacatacacaatgttgtacaatcaccacgtctatctagtgaaaaatattttactcttgaaaaatgtctaaatcatccccaaagaaaatgccatacttcattagaattcactgtctattcctctcctcgcagcccctggcaaccacccatgggactgggctgatacagtggggcacacacatggcacatgggacatctgtacattggactattcttcaaccatttaaaaaaaatgggccaggtgctgttgctcaggttggtaatctcagcactttgggaggccaaggaaggagaatcactcaaggctgggagtttgagactagcctgggcaacatagaaagaacccatctctacaaaaaaaattaaaaaatcagccaggtgtatggtgcatgcctgtggtcccagctacctggggggctggggtgggaggatagcttgagcctgggaggtccaggctgcagtgagccatatctcgccactgcactccagcctgtgtgacatagtgagaccttgtctcaaaaaaaaaaaaaaaaaaaacaactctgtttttgagatggagtcttgctctgtcacccaggctggagtgcagtggcatgatctcggctcactgcaacctctgcctcccaggttcaaccaattttcctgcctcggcctcctgagtagctgggattacaggcacccaccaccacgcctggctaatttttttttttgtatttttagtagagatggggtttcgccatattggccaggctggtctcgacctgctgacctcaggtgatccacccgcctcggccccgcaaagtgctgggattacaggcgtgagccaccacgcccaccaaaaaaggtagttcggatctgtgctacaacatgaatgaatcttggacattatgcaacttcatataaatgcagtcacataatatgtggccttttgtatcttttttttttttcatttaacataatgttttcttggaggtccagccacactgcggcatgtatcagaatgcatgtggcgagtatactatctctgtatggctagaccatattgtgttcctccattggtctattgatggacatttgagttgtttcttccttttggctattgtgggtaatgctgctatgaacatttgtgtagaagtgtttgttgagtccctgctttcacctgttttggatatattcctaggagtagaattgtggggtcattattgcattttaattagaaggactctctactctctgaaatgtgttggtgacatcattgtctgtggctttttgaggattcctgtccatcatttcacattttctgaattctccagtttcacctacttgaaggtctcccatagaaccactcatggactccaaggtgcctgttgtgaaggccttgacccctctcacatgctgctcttgttttgcactgaaatactaaataagaggaacagtgctttgccgttgtcgggggctgagggggaaggaggagacagagatggggtgaagctgtcctttttttttttttgagatggagtcctgctttgtcgcccaggctggagtgcaatggcgcaatctgggctcactgcaacctctgcctgcctgcttcaagcgattctcctgcctcagcctctcgagtagctgggattacaggtgcatgccaccacacccggataattttttgtgttttagtagagatggagtttcactatgttgcccaggctagtcttgaactcctgagcccaggcaatccacctgccttggcctcccaaagtgctgggattataggcatgagccactgtgcttggctgaagctgtcgttctttagctgccgttggaccctcccttgccagcagaatcagagtcattgctgtaagaccagtgacctggagcagccctgtgagggaaggaaggtctgtgctaccacctgtggctcttgggtcaggcagaggagtctgatgagagtgtcctctgctaatcagagtgtgaacttgagcctgtaagagggtggagtctattatagatggacagggcagctacggagcccactgctcctgggcctcccaaagtctccttctcgtcccattgccctcatctctgtgctccattctccctcctccagacttcatgctctaggaaaccagattaattttgtagttaacccaacctccaaaggcagcttctgggctgaggcctctcccaaggatgttcttgggttgtgtaggctgccaggtggtgctagacttaagtctatctcagagccagcccctggttgtcccttttcgtgccctttcccctccaccctcaggcagttgagcttgctgaggcatcaggctctataccttagtgggagtcaaagctggtttgctagctttccaaggaacaactccagcctcctgccttccctgcatccccctccaattaaaatacagacccgggtcagcagtggctcaggcctgtcatcccaacatttgagaggccgaggtgggtggattgcttgaggctaggagtttgagaccagcctggccaacatggtgaaaccccgactctactaaaaatacaaaaattagccgggtgtggtggcgcaagcctgtaatcccagttactcaggaggctgaggcgtgagaattgcttgaacctgggaggttggaggttgcagtgagccaagattgtgccgctgcactccagcctgggtgacagagggagactcagtctcaaaaaaacaaaacaaaacaaaacaaaaaaaaccacagacctgaaatttagctggggctatgtctggtcctgcacatacaacagcaaatgacgtggacagtctctgaactcagaccctagagtctaatggaagattcagaaaagcgtgtgttccaattaataaaatacttacacattctgagaaaaactgtgtgggaaatgaacagtgtgctgagataatgactcactgggatgtgggggctgctttgggtaagaaggagccagtcactccttctatatgatctggatgtaatccttccttctggagttttttcaggtcctttttcttttatgttcagaaatttcatgaggatgtatcttagtttttttttttttttgaaatggagtctcgctctgtcacccaggctggagtgcagtggctcgatctcggctcactgcaagctctgcctcccggattcacgccattctcctgcctcagcctcccgagtagctgggactacaggcgcctgccaccacgcccggctaattttttgtatttttagtagagatggggtttcaccatgttagccaggatggtctcaatctcctgacctcgtgatctgccgccttggcctcccaaagtgctgggattacaggcatgagcccactgcgcctggccaggatgtatcttagttcttaatgtagatctttgttcattcattcaatctgatgctttttaagccctttcaatttggaaattcaggtccccttttagttctggaaaatctacttcaattttttttttttttttttttttgagatggagtcttgctcttgttgcccaggctggagtgcagtggcacgatctcagctcactgcaacctctgcctcccaggttcaagtgattctcctgcctcagcctcccaagtagctgggactacaggcgtgcaccaccatgcccagctaacttttgtatttttagtagagatggggtttcaccatgttggacaggctggtctcgaactcctaacctcaggtgatccacacgccttggcttcccaaaatgctgggattacaggcgtaagccatcgcacccggcctatttcaacatttttaaagataattttcgctcatccgttttctgtattcttttcttttagggactcctacttgtcagatgctccacctcctacagagaagttctgtgtccttcgtcttctggtgcatggttcccttttatttgtgttgtaatctttgttatgctctagattgttttctctgctgtatattctaacccttttgtttacttttaaaaaatgtatttattttaaacttttaaatattttattaaaattttttaaatttaagagacttttccattttctaagcttttcatagctcactgcaacctccacctcccggattcaagcaattctcccacctcagcctcccaagtagctgggattacaggcacccgccaccacgcctggctaatttttgtatttttagtaataacggggttttgctatgttggccaggctgctctcaaactcctggcctcaagtgatctgcccgcttcggcctccccaagtgctgggattacatagcattctattcttatagacaaaatgtgaccttgaatttttctgagaatagagatttttttttttttttttaagacaaggtcccactctgtcactcaggctggagtgcagtagtgcaatcatggctcactgcagcctcgacctcctgggctcaagagatccttcctcctcagatcccaagtagatgggactgcaggtgcaagccactgctccctactaatttattttttgtatagatgagggtcttgctgagttgcccaggctggtctggaactgctggcttaaagcgatactcccaacttggccttccaaagtattgagattacaggcatgaaccatcacacctggcctaaattgagattttcttccctgaatcatctgtttcctctggtgtcaggtgttttctctttgttcgtcttttctctccctttcatgatgcagtatttcctcaaatgtctggtgactctttggtgtgtgaggcaatacagaggctggcagggagtgttgcttacataagcaaggtttgtcaaaaggggggcttccttttagccagagaaagtaggaaactgggtttacccccaaggatttctcaaatgccagaagtagagggcttcgtggggaggcgccagcacttgtactacccacctcataagtttctttccaaatggtttatttatttttctgtttcgttttttgttttgttttgagacggagtctcgctctgttgcccaggctggagcgcaatggcgttatctcggctcactgcaacctccaccctcccaggttcaagcgattctcctgcctcagcctcccagattcaagcgattctcctgcctcagcctcccaggtagctgggattacaggtgcctaccaccatgcctggccaatttttttttttttttttcgtagagatggagttttgccatgttgcccagactggtctcgaactcctgaggtcaagaaatcctcccacctcagcctcctgagtagctgggaccataggagaacatcaccatgcccggctaattgctttatttgtggaaactgaggtcttgttacattgctcaggctggtcttgaacttctaagttcaagcaatcctctcaccttggcctctcaaaatgctgggattacaggccaccatgcctggctcattgtagttttaatgggaaccagatttgattttggaaaaataaaggcatgaaatgttctgcctgagtactatggagcaatttgtagttattaccaaggtgaatgctattttttctttttttgagatggagttttgctcttgttgcccaagctggagtgcagtgacgccatctcggcacactgcaacctccacctcccgggttcaagagattctcctgcctcagcctccccagtagctgggattataggcgtgcgccacaacacctagctaatttttgtatttttagtagagacggggtttcactatgttagccaggctggtctcaaactcctgacctcaaatgatccgcctgcctcggtctcctaaagtgctggttacaggcatgagccaccgtgcctggccagaatactaaattttataacagaagtatctgaggggctacagatggaaaaagaggataccgcttccactcagagggttgtctgggatgtcaccactgtgcacacatatcaggagggagctgggaatcacttgccatccaggttcaaggtcatccaagtatagcactggatgttcccattctcacaacctcttccccattctgggccttcactgcctccaactcatgtcagcaagatcatgatgagctcctacctaaggcgggcctcagcttccccagatacctgttgaagccactagaccaaaactctcctatattttccgggctggtcagtcttaccttctggctatgtcttatgctggttgggaacttacacaaatgctttattttggaaaaatgcctgggatgacaaaaaacaaatccgagacctccccagagctggaggccttggaggctccccggcaggagctggtgggctcccggcaggagggagagcttgagccagtcaatcatttacccagcaggcatggggaaggtggtgagcttttcaatagaaagccctcaggagaaaggaattaaagtgcgtattgtgctgggctttcctggggtgaagctggcagagcaagaggtgaggtgaggaagaggcaggtgattagcccccgcaggggctgggccttccctgatttatggggtgaccctcactggcctttcccaggcaggaaatgggctgtttactaatgccttccccctgccacacacctgtgaaagccagttggtagtattttaaaataatttactagaatgaagtttctgtgttttcctttggatagttgcccagtaactggctttgtgttttttatttttttaaaaatggcttaaaatatgcaggatcttaagcttcaatatttctgtttgtctctctctgtctttgtctcactatctgtctgtctctcatacacacacacacacacacacacacacacacacacacacacacacctgtgtctcaggcaagaaaggggtcctcaccctaggagatgtaagatggcttttctttaaatcgtggaagtcttagttaattctttttaaactaattcatcactggctctggggcttctctgctttctcctccttcctgccacagtgaccttaagccacagagcattgccaattctaattttgtctaaaattggtgcttctggcagaagaaatgtgctgttggcttgcctttgagctttgcctgcctcgggttagcaaggcctccgtcagggactctgtctccagtctacgcagcatgcaaagtcagccatgctacctgccctgacaggggcatctgatgccaggtgaggagccacccattctgtttgtaagagatgcaaaaactgcctttgggggaattgcaattcattcccttcaaggcactgagatggcccttacagtgcacagatgaaaaaccactgccaatttagcattgtattctaggacaaataggggaaggctcactctgagaatgaacgatgggcccaggtgcttgctggcctcaggaaaggtgctcagctccacctcctgttctgctgccctctcctcccccaagacccacacacatgaagtcctattgggtctccatgtagctcttaggaactattttactaaaccgtcgcttacgtgcagtaggaaatttgaagttccagttgcatgaaagttttctcatggtgaagggactttacgggcatcttcaagtcacgtgagcaaatgctttacttttctcagccccagttttcccgtctgtggaaggagggtgaggatggtgctgacttcttgtgtggctgtgaagatcgaaggtggtaaatctgtgctgttgattgctccctcctccttgaaacgggctctgcccttggcttccaggacgctcctcttttggttccccttgccccctgggcatttctcacctggctcctgtgctgaatcccccagcctctgctagcttctatacgccactctctctagggctcggcccggtctctcgggttcctcatctatattcacctccagtgtgatcttttctagttgcatggtttaaattccatctctgggccaatctctccagctcagggctgtccctgaacttatatatctaagtacccactcaacttctccactcaaggtagctcacaccaaatagatgagagcaaacttgatctacctcatcaacacccattctttctggaatcttcttaatttcagaaaatggtaatgctcttcttccagtcgatccagtcccaagccttggcatcatctttaaagcatcttttttttttttcactctgcatgcctggccatcaggaaaccctatcagctctacctgcagacccatccccatctcttcccacctctccactgccaccgcctagtccagacccacatggagtctacctgcctggattgtcaccatccatgcttctccttctgcctggcagtgggggacagggggaccaaggcagggaggcaggatggcgttgtggccaaatgtggggctttggggccaggatttttgggtgcaaattctggtgctgtctttgatttcttactatcaataaattgattgttattatacacatttcaaattgtgctgtagttttcaaattatttccattcaggaccgcagtggttgacatgaaagtgggatttctgggacatttcagaaggctttgatttcaagaggctaaatctatgaaatcaattagggtgtgttgtccaagaggggaaacaggtgctttcagtataggagggggcggctccatctcgggaaacagcttcccagaaactgcctgggaaaaaggttactttttctctagggtcctacagggtggaagattccagtgcctatttaaagggaggtatgaggagcactgggagctcctaggctgtgaaggcatcaggcctggcaatcagtgggaaaccagggcgaccccaaggactgaagaccgacgcccccttcccttctaagtctagggcctcccttagtgctgggcccctgagaccccctcaatgcaggggtaggggaccagaaaacatggctgactttaatttacattttttccccataatgactttagatctctctggattggagccaaatttgatttgattaagagaaataaagaaatgcagcattcttaatccataagagtcatgctgtaaatttatgcctataacaacagttttctggaacacatgagtcagactcatgttcctttttcagtctgaaatgtggggttgtgcattgtacttccacaaggagatcatgcttttgttgaaacaaccttggttaagaaatcctagtcccaaagatttgggtggatacaggcatctctcatggccaaggttgtaatgtggcaaagaggggctcagaggacccgaggaatggcgagagccagagagaagggagagccaggtgctgcattcttacacctgtttcctgagtgtgggaaccaaggtcttacgaaggtcaacttcctgtctgagctggccagcttttggatgacggagccacgcgtgtcccttcctgtgtgccagttcctgtttcccatgggattccatcttggccctctgggtctgacatcacctttcatccaatccagctaggacccagttaacacaagccctgtagagtgatggttctgcaaagagccgaatatggccatgaagcaattccctgagttatttggatatagtctggacataaatgtgcttagattataggtcatgtgtcttcttgagttaatgtattcaccccttgcctacctgtctgggttcaaatcctgggtctttttcttacttgctctgtgaccctgggcaagtaacttaatctctttgtgctttagttttctcctttgtaaaatggggttaagaataatatttagctagtgcggtggctcacccttataatcccagcactttgggaggctgaggcaggaggattgcttgagccagcccgggagttggagatcagcctgggcaaaacagtgagaccctgtctcttaaaaaaaaaaaaaaaaaaaatttagtcagctgtgtggtggtggacacctgtagtcccagctactcaggaggctgagatgggaggattggttgagcccaggaggctggactgcagtgagctgtgattgagtcactgaactccagcttgggtgacagagcaagatcctatctcaaaaaaccaaaacaaaacagaaaaaaaataatactatttatctcacattggatcaaattaatagatgaaaagtatgcctgatacatagtaagtgatcaataaatagtaatcactattactttcacctgaggaagaaagcgagccatatgttatttcagtagtgacagaattcagagaaagagtttgaaaaagttattttttcatggcagggtgcgttggcttgctcttgtaatcccagcactttgggaggccaaggtaggtggatcacttgaggccaggtgttcaagaccagcctggccaacatggtgaaatcccgtctctactaaaaatacaaaaattaggcaggcatggtggcaggtgcctgtaatctcagctactcaggaggctgaactgggaggatcccttgaacctgggatgtggatgttgcagtgagtcgagattgcgccactgcactccagcctgggtgacagagcgagactccatctcaaaacaaagttattttttctttcatttgtaacaggtctgttaactagaataacttcataaaatgctttctggatggtgcccatcaagcaaagacagacagtatcattctgttggtagaaaatttttttcctcctttttatggattcagatttattccttttttataacttaaagaatagatgacaactgcttgttttatcctaaataaatgaggacctctcagatctcaatgcctggcctaaatagcatggcagatcccagcctcctcagcttctctgtggtcagataaaggccaagatgtgttgcacccactccttccagaagagtcatctgttgcctggggtctagaggttcatacaaaacaaacaagaagccagaagcagtggctcatgctggtaatcccagcactttgggaggctgaggcaggaggatcatttgaggtcaggagttcaagaccagcctggccaacatagtgaaaccccatctctactaaaaatgcaaaaattagccgggtgtggtggcgtgcacctgtagtcccagctacttgggagcctgagtcaggagaatcgcttgaacccaggaggtagaggttgcagtgagtggagactgtgccactgcactccagcctgggcacacagagcaagactccatctcaaacaaacaaacaaaaaagaaatatgtaagtatgtgtacagctgttccttcaatcctccactcttcaatattgctaggaggcccctgagggattttatcacaacatagtttattaggtataaatggcagagcctaaagcaatcagaagagggctgcctggtgggcacatgttaccggtgtgagccttggccagtggagaagcaggtgcctgacccactcaggccaggaggaggcaccaagtcaggagagcgttagcaggcctcaggccttgttgattccggggctctgggctgtgggctgcttggcctgccctttcgacaccagttctcaagcctcttgaccactgtactagagcctccctggcactgataccagggtctcagcaggccattcaagcgagcctggccagctggctactgcggctcttccctgcatgcagtgactgctggaaccctgactcccagactgcagagaatagagggacttcacgtgacagcccctctgtgtgtaggtctcaggccaagcccttccatggagtgagctgtttcctcccacattcagagcctcaggttggggacagaggcatgagcaggtgctgtccgaggtgggccaaggacatgagcccatgtggatgtcagagcaggcccaggctccctgggctgctggggggtgtgtgtcaccatgtgacttagatcatggccagcagggatcagcagtgttctcagagccatcaggcctcccccagcttcccagacatttttcgcagctgcaggaacagccacagatgctaggacctgttctcattgcatccaggactggccaccccagaaaagaagccagtgaagtcccagtggggcccttgggggcaagtggtgctcctaactgggctttttgccaaagcctagaaagctaagacaccaaccatgtttcactccatttttcctttttttttttttttgagacagagtctcactctgtcgcccaggctggaatgcagtggttcaatctcggctcactgcaacctctgccttctgagttcaagtgattctcctgtttcagcctcctgagtagctgggattacaggtgcccacaaccgcacccagctaatttttgtatttttataagagatgaggtttcagcatgttggtcaggctgctctcaaactgtgacctcaggtgatccgcccgcctcagcctcccaaagtgctgggattacaggcatgagccaccatgcccggccccgtttccttctgactcttgtttttttaccagtggggacctattgctcacaggaagaaaaaaacagcgtccttattttgtgacttctggcaactgtctttttccgaggaagccccttcccttctgccctgcctctgagttcaagccgggatgcagctcctagtgttttcaagcgtcttacagatggagatcagccccgtcttcctccaacgtccccaccccgcatcggagtcaggactccacggtgctgtggtcagcacggctgcatggtcctgcgaccctgagccccagtgggctctgactgtggttaccagcgccttaggagacagagtaacagtctggaagcagaaacagagactgtccatttcataaacagccacatccgcaaggtttattcctggatcacaaaccaaccccactgaccaaactcccaagtcactttatattaaacttgttatcaaatcacccacataaatatatataataaatacaaaaacagacaggattttttttttcagtctttggtatagagagctttctcctcctcttatttccccctctgtccctgtgctctaaagacatttcctcgcattcacattatttccttggatacaaaaattgcccagaagtaaactttgtgctggaacccctgcctccattgacagtcccgccggggacccagcccacagcagcccaggggagaagcaggctgtggggactcacacgtagtcgttcagcctgtacccgctgtgcgtggccgaggtcactgagggggcccgattgtctttgtaggcagctggtggctggtaggcaggtgcggtgtttgcagtggtcgtggtggccctgggcggggcctggtagggcctgtagggtgcctcgtcctggcaggacaggcaaagcagggtgccaccaatgagcgagagggacgaggagatgaagcccaggtacagggcctggccaatctcaaacttcatgccgctgggcagcagcgggttgtagaagttctgcaccacgtcgttggtggtccaggagacggccaccatgcacaggaggccggccaggatgaagagggtgccgccgaggatggcaaaggtggtcttggcgggtgtgcccttggcgcagcgcgtgcacttcatcccgatgacggcgcaggcgcaggctatgcccgagagcaggcaggagatgaccatgagggcgcgggcagcctggaggtcttggggcagcgccagcagggatcggtagatctggcactggtagatgcctgtgctgtgccacacacactccatccagagccctttcaggtaggacacggccgtgaggatgttggtgcccacgtgcgctgtcctccgccagtgcggcaggatggtggtgatcaacgtgcccaccatgcccaggaagctgagcaggaagcccagaagctgcacggccgtgctggccatggtgcggctgcctgcctaggccagccgggcagctccctgggccctcggggtcacgccgctcctcaggtgccagccggagccctaatgaagccaagggaggcgggagcagggagagaaaggaaatgggttaaagattatctcatgcacttatttctgtcaccgaaaccaagtttttcataggtggttggtgtggcaattagcatgttctcaaaaatagtttctgagacttcactgggtgggagagtaactgctttcctgggaaggtgggatctgaagggatgacagccggacgctggcctcagggaagggttccagccacctgccggaagttctgcttatgtccacccttgagcactgctgctgcattggcatctcctgtccttcctggttcatcagtaaccaggaataacagttgttaaatcaacatgtattattcatgccttggactgacagtgctaaggtgtgtgccagctgtgacttagaatatagccctgggcggttgtcaggatgaggggttttctgaagtaggcaacttccccacccacgtgctcgggcagggagaggtttagtcccctcggcaagtcagatgctgccttcagaattccagagctggatgtgacctagagattgtcagctgatgccggggcaggaatttccaaggtcacagctcctcaggagctgcggcaggagcacgggccagcatccctcctctccagcacggacctccgctcccaacacgctccccattcactatgcctgcttgtgactggtgagggctgtccgagggtgactttattataaaacagaggctgctacctggctttcagggatatgggaatgctgagccctttcaaaggcttttaaagaattcttagcataccaaaatccaggatactttttcgggacaaggacccagcatcaacatagggccaggcatatagaagacactaagggccaggcacggtggttcacgcctgtaatcccagcactttgggaggccgaggcaggtggatcacctgagttcaggagttcaagaccagcctggccaacatggtgaaaccccgtctctactaaaatacaaaaattagccaggcatcccgtaatcccagctactcgggaggctgaggcaggagaatcgcttgaaccaggaaggctgaggttgcagtgagccgagatcgcgccactgcacttcatcctgggcgacagagtaagactccgtctcaaaaaaacaaaacaagcaaacaaacaaaaaaaaacactaggaaatatagaaggaaggaaggagagagggaagaagaggagggagggaggaaggagaaagcaaggaagggggagcacagagaaaggaaggaaaaaaaggaagggatgaaggcagaaaaggaagggagtggaagtcttgagtggaccactagcttttctctcctgcctggggcaaggtaatcagcgagaccgggcattagcagcgagcattaggaggtcccagccctggctgcgcccatccagtgggcgacctggggctcagcttcttttttggttctgaagggagaaaagggaagcgtctctgctgatgacaagtcacttcagcgtcccaaaccagcaaagaatcagtaggcaaaacctgcttcttcttctgcagagagctgagcctcagttaagcagtgcaggctgcaggcaggaaaagcgggtctgcagggtgttgcccatgagaccctgggacattgtcaagaaatccccatcggggctcggcggctcacgcctgtaatcccagcactttgggaggctaaggcgggtggatcgcttaaggtcaggagtttgagaccagcctggccaacatggtgaaaacctgcctctactaaaaatacaaaaattagctgatcgatggttgtgtgcacctgtcatcccagctactcaggaggctgaggcaggagaatcgcttgaaccgggaggcggaggtttcagtgagactggatcatgccattgcactccagcctgggcaacagagcaagactctgtcttgaaaaataaataaaataaaatgaaataaaataaatcaataaataaatcctctactagatgtaaatcacttggtaagtaaataattaataactgatgcttccactgggagtctaaaccatcatcttgctaatttaaaaacatatactgggtttaaatactttggcattgtaggaggtaattggttctgtcctggtgaatgaacaaacaaaaataaataataacaaaacaacgtggtgcctcacaggacacggagtggactgaaggtgtgtccaggtgatagggtttggatttgtgtccccacccaaatctcatgtcgaatggcagtccccagtgttggaggaagggcctggtgggaagcaaatgaatcacgggggtggacctcccccttgctcttcttgtgatagtgagtgagttctcacgagatctggttgtttaaaagtgtgcagcacctgcctgctcccctctctctcttcctccttctccggccgtgtcatgcctgcttcccctttgccttctgccgtgattgtaagtttcctaaggcctccccagccacgcttcctgtacagcttgtgagagccaatgaaacctcttttctttataaattaaccagtctcaggtagttctttgactcaggttgcattgcgagaacggactgatacaccgagtatttttctgctgctgtttttctgctgctgctttgggtgactatttgttcacagcccagaatttgccacacgcactatgcacgatgctggctttgcacaaagcctctcttccctccactcagcaagcactcactctgtccaggggctagggacgccatcacagtccctgctggccagagaaggaccggggccggctgtcctatgctcactgccctgggggaggtgctggcaacaaggccaaggtggccaccctgataggcacagccagagggggtgccagcggacccaccctgcaccctgagcacaccgatggcaccagctgactgagcctgagcatggtttgaacactgacacatttcctagtttattcccaacaacctaatgtggcagtgactgttaccatcccctttttacacatggggaaacgagaggagcagaggatgaaagttctgtgcctggcctggctagtgttctccttgctgtcatttcccctttaagaaacactacctgcttcaatgacataggactgaagttagtgtaagggctgagggatggtgtgagcaacagattctccttcccacagagatctcagaacaatggccttgccccttttgcagtggtttgggcagccagggcaaccaactgccctgctttgctagggactgaggggttgcccaggacagggaccttcagggctgaaactaagacagtcccaaggaaaccaggaccagaggctcctccaggtgcccagatctccgaatggcctctgagatctcttcctgccctgctttgaggctgcctcaaggctgacggccacacagggtgtccctggtccaagcataatggggcttcttgcagctctcactgtcaaggtcaataattaagtatacagaccctaaagaatgtggcataaaagccaagcccattaggctaggcaagtggaccagaggtttattggaggtctaaatatttatggagagcaatgatggctaattttagaaaccattaggttgctatttttaaacgtgtgctataaggatttgctaatttaagaagtgagtgttaatgagcccccaactcccagacacaagctccccaacctgctttccttcttccttaccagcagctgctactggcattaggtaataattcaacttccccgcaactacttttcactttggggcctttcaagggaaaaacaactttaactgaacgcatctccctggaagccacataaaattcctccgtgatgctccggaagcgccctgccctgcagggctgtttgtataggaaggaactagcccaagcctggcctcccagggggagcagcccatgcagggctgaactggtgttcacctgtgggctaccattttcctgcagccacgtgtgtgcatgtgggaagatttgctagagagatacggatccaaaacaaatagggttccaagcatcaagctctagaaagccctcgacaggctgagtagtggtgggaaggcagaatctaacaagatgtgttagaggatcagtactgggtcctgcatttgggttcacaaaaccccaaaagtacaatcctgggtggggagtatgtggcttagctgcacctgagagcaggatttagggctgagtttcccaacgacagcatcttggaatgctgcatttgcaggatgtcttgtgtggaggacacaaatgtcaaatatgtttaagaaaacctgcgtgactgtaggacttctcatagctggaaacgtgtcaatgtgcatcgtgactctcccaggaaatgtctcatgggcagcatccgctaaacttatttgactagagacacccccctgcaccccctttaccaaagaacaatttgcaatgaaatcactttggcacaataacttggacttggcaatggtgagatagagtgggttgctgtattagtttgttctcatgctgctatgaagaactgcccgagacgggtaatttataaaggaaagaggtttaattgactcacagttccgcaggactggggaggcctcaggaaacttacaatcctggcagaaggtgaagcaaacacatcctctttacatggcagcaggaaggagaagaatgagggctgagccgagggtgaggccccttataaaaccatcagatctcatgagaacttactcactatcatgagaatagcatggtggaaaccaccgacatgattcaattacctcccactgggtccctccccacgacacgtggggattatgggaactacaattcaagatgagatttggatggggacacagacaaaccatatcattctgccctggcccctctcaaatctcatgtcctcacatttcaaaacacaatcatgtccttccaacagtcccccaaggacttaactcattccagcattaactcaaaagtccaagtccaaagtctcgtttgagacaaggcaagtcccttctgcctatgaatctacaacatcaaaagcaaattagttacttcctagatagaatgggggtacaggcattaggtaaatacccctattccaaatgagagaaattgaccaaaacaaagaggctacaggccccatgcaagttcgaaatccaatagggcagtcattaaaccttagagttttggtcgacttcatccccagcagagagagtatcagaaaacgacagagcggtaaagaattttgaaaatctgtgaaaggcaattgtgaaatgctagagctgctataggcccttccaactggctctggtttcaggatcaccagctctgaagggagggggtttttctgtgtgtgtccatataaacttttatgttgtctccctctgttttctctgagctatgtttttctttaaaaaagcagggttctggagcacacagtagggtgccctcattttgctcacctcctggcccacctggaccccagctgcgtcaactttggctccaaattaatcatcatttcaacagcagtggccatggggatcgcctggccaggactgaggggtggacgtgttgtttaccagcctgcgtcttgactgcctggggtccctccctgggcatgtctgtttcatccttcactttgtcctatcttcagaagtcctttctctagttcttcagggtgtgtgctggggcctctgtcagtccaggcttcttggaggggtgcgggggtgggacgaggccaccctatctcaccattggtccaagtgactgtgccaaagtgattttactgcaagttcttctttggtaaaggcggtggtggggggtgtctctagtcaaataagtttaatggatgctgcatatgagaccaggcttcttggaggggtgcagggatgggatgggtggggtgtttgagtcccttactctccttaaccctcagcagtctcacctgctactgtcacctcatcccttgcaaaatcagcccctgtgatgaaagctttcctatggacacacattgctccgtggcccttgtctacccaccttggtgaaagaaatgtcagccccagatgggaggggtggaggacatcagcggggagctggggcacaagccaggtgtgtggtggaagtttctttacccagaactgccctgagccctactgtgcaggtagagaattggaggatgtggccaccagtgccttttgcctgccatgtggtctgaatggctctcgagatgtttgggaacgagccattatatatgtttgccctcaaatgctctgacatgatgttgggtccattatagaaacagcgtaaaacttgatttgctttctgtaaacttattagagaaaaatgaagtgccaccttcaaatgaacatagtcattggcccttcaacgttgatgttcagccacttcagaaaatgtctggttcaaaaacctgaatgtcctcactgtcaccccaaccaaatggcctcttcattactgtttagctatttcataaatgctttaggctggagatggtggctcacacttgtaatcccagcattttgggaggctgaggtgggcagatcacctgaggtcgggagtttgagaccagcctggccaacatgatgaaaccccgtctctactaaaaatacaaaaattagccgggtgtggtgatgcatgcctgtaatcccagctacttggaggctgagggaggagaatcgcttgaaggttgcagtgagctaagattgcaccactgtactctagcctgggtgacagagtgagactctgtctcaaacaaaagaaaataaacaaaatcataaatgcttgaatttaggaactaaaaataaactcaggggagatttggattcatttagataagacatattagcaaaactacctaacacagagaaaagaaagtaactcttacgctatgatgtatctgcatgaagtaacttcaactagtattacttttttctttttctttctttctttctttcttttttttttgagacagaatctcgctctgtcacccaggctggagtacagtggcacgatcttggctcagtgcaacctctgcctcccaggttcaagtgattctcctgcctcagcctccagagtagctgggattacaggcccccactaccacgtctggctaatttttgtatttttagtagagagatggtttcaccatgttggccaggttggtcttgaactcctggcctcaagtgatccacccacctctgcctcccaaagtgctaggattacaggtgtgagccactgtgcccggactcagctagtatttcctaagggcatcttggacactgtgtttcttaatcatgtgcgaaacaaacgcatatcttttcaagaagcttagggatactttagaggggctatttttagcacatcttcttacagaaatatgtaagaatgatgagaaagcgatcaagcaataccttggaaaaaccacttcatattcatttcacatgggctatactgtggggtgttggctctaaaaataatattttcttcattactattccaaactttctgtaactttccttgggttatttttcagactggcaggcatctagattttaaatgtgtgaggactttctataccatccgcatagagtctttgatgcactctttccatgagaggcagagacgggatacttacgtgactacgacttattactatcatgatagttactgcttgctattgttatttaggaaaaccaatgtgaagtatcttactcaaaatcacacggaaatgacacgttccatgaattcctcctgtctcttttggatgaagaaataaaaatctatttttttataacaagaactgattcgaagaaaagtttatgtgaatacaaatgaaaaccatggatgcagttaaatgctaacagaggctattttcaactcagtaagattgaatgacctattgatttaccgaaaactacaaacttaagtcaccatgaccacaaaaattaaaaccctttctggaggcattatctctctcatttcaactcaccaaatttcattagaattcatttaaaatgcagtagatcaacatttagaaatgaaatgagtttcatttacttaaatacatgagtgccttttcagagcgatttttcccgacaagacagtcaggcaggtttgctatgttgctgtttttgttgttgttgtttttcatttttcaaggtgcaggtcattaaaaacttgtcatctgagattaaaaaaaatactagaaaagtaaaacaaaacaaaaacaaaaacaacaacaaaaaaacaataccccaaaaaacccaggtggacatacaaacatttcctcaagccttagctgattgttggatgacttatggttaagtgttctgtgggaacactttatctaggggatgcaatggattgacctggtcccccaaaagagatatgttgaagtcttccctgctcccagtgcctcagaatgtgaccttatttggaaatagggtcattgcagatgtaattagttaagataaggtcatacgtaaaatagagtggcccctaagccaatagggctggtgtccttataagaggatgggcatatgaagacggagatagaaagaacatgtgcagacggaggcagagagtggagcgagaagttaccaagtcaaggaatgtggaggatcgccagcaacccgcggagaatcgccagcaacccgcagaggcccagcaggaggcccaggacagatgctccctcacagccctggaaggaaccagcctgcccacaccttagtttcaagcttccagccttcagaatcatgacagaataaatttctgttgtttcaggcctcccaggttgtggtgctttgtcatggcagccccaggaaacaaacacagcagagtagctgaatggtggcacggggaattacagagaaaatgctcggccaggccccatggcacaggcctataatcccaacactttgggaggctgaggtgggaggatcacttgagctgaggagttcaagaccagcctggtcaacatggtgaaaccctatttccactaaaaataaaaaaaaattagctgggcatggtggctcaagcctataatcccagctactttggaagctgaggtgggaggatggcttgagcctgggaggcatagattgcaataagcagagattgtgccactgcactccagcctgagtgagagagcaacatcgtatttcaaaaagcaaacaaacaaaaaaacctcatttgtgattataagaactgcgtccccttccaggacaggcattgagtgtgatctggtggcttcacatttgtcattgataaaaacaggccaggtgcagtggctcacacctgtaatctcaacatttggaaggccaaggtgggaggactgcatgattccaggagttcgaggccattcctgagcagcatagtgagatcctgtctctacaaaaaacaaacaaacataaaaacaaaaaacaaagccatggttagcttcatgtctcaaagtgtggaggacaaaatctaaggaaaaggtagaggacatggagaaagaagaatctggaaagtcccctgcaaatttgaaaattcaagtgcaaacacaatctatagtaagtaagccatatagtaatcaaatgactcagcttctccaggcttaaaaagtgtgtgaattcacttagctcacagagagtttgggggggctcatgtctccagcttgtgtgcaattggctggggtataattggtgactgaccttttcaggctgggtgtctggttttcttaagtcaacatgtcttgatttcatagagcataaaagccccaaatttggggcagagtccagatttgaataaggtgactcagaagcctgctgaagctttaccttggaaatccagcagagcccactaggctccgcctttagtcaggacttacagcaaaatagaaaaagaaagcaaaccccaaacaagcaataggacattgtcacacctggctgaaaaccttcatgaattagacaactattctgtgaatttcgtaagcctctgaaaattatttacttgagaattgaactggggataaactgcagtggttaaaatgtgtcaaatgaaaacataaggctaagattttctaatggtaaggaaaatactattaaacatgaggtttaaaactcattctctgtaaatttagcctttgaagcccaggtgctccaaagcagttagttgttaatgataagagtaaaaacagtcatagttaaagttccagagtgtttatgatatgccaaacatgtgctaagtgcttctgtgggcatgcaatgaactcttaaacaaatcgcaatgcgcattttgccatctttatttacagatagggaaactgaagtgtagaaaggttacataacttgtccaaggttacgtctgggctgaattagggagaccaaacaggaggttcttgtgatctttcaggtaagagatgccaggaggccgagccaaggtggtggaaataaaggtgggtgccaggaagaggtcagtttctatattcaggtgaggctagcgggatgtgctgatggtttagctgcggggtgtgagacacaggtgcctaaggttattgtcttgggcaactggaggaatggagttgccacttattgagagcttgaagagggttggagatctgggtttggaggatgtgatgatcaattttttgtgtcaacttggctgggccatggggtgcccagatatatgattgaacactattcttcatgtttctgtgaagttagtccttggacaaggttaacattgaaagcagattgccctccatagtgtgggtgggccacacccagtcaggtgaaggccagactggaaccagaaaaaactggtgtctccatcagctcaggctgccacaacaaaataccacagacttgctggattaagccacagaaattaattttctcacaattccggaggctggaaagtccaagaccaaggttctggctgcttgggttcctggtggaaattcacctgacgtcttctttgcatgcaggcagaggaaatctttctctctttcccttctttttagagcacgaatctcattgtgagggcacccaccctcatgacctcattgaaccctaatgacctcccaaatgtcccgtctccaaatactatcacatcggggcttagggctccaacataggaattttgggagaatgcaaatgtttagtccataacatgcagcttcacctgagcaagaaactctctccaacagactgtgtttgacctttatttccaacatcagcccttctcagctctatagcaggctgccttccaactgaaactgcagtgtccgtgatcctgggtctccaaactgctagcccaccctgcagaatttcattttatagatgggctcttgctatattgcccaggctggtcttgatctctcaggctcaagtgatcctcccacctcagcttcctgagtagctgggactacaggcatgtgccatcacacttggctaatttctaaaaatgttttatagagatggaggtcccactatgttgcccagcctggtcttgaactcctgggcttaagcaatcctccaaccttggcctcccaaggctgttggaattacaggtgtgagccactgtgcctggcccaccctgcagattttggacttgccagccttgagaatcatgcaagccaattccttagaataaatagatctctttctatataaatgcatattcgattggctctgtttctctggagaactctgactgatacagaggatgaagggcagaagagaggaattttcttttggacttgttcagtttgagatgtctgtgcctacccacctggggataaccatggttgcatatgtaagtgcagggttcagggagggactgaactggagaagtctgtttgtgtcaccaccgcatggagatgggattaaaatatgggatggagtctcttaggagggaacgttagatagagaggagcaggggctccagggctgattctaggaaccctccaacatcaggggagggatgaggatagaggtaggaagaggagccagccacgggctgtaggaatgggcgatagtgaacggtcaacccagaggagactggtgagggaggacagagctccatgttggagagagcaatctactctgtcaagtcaagtaatctgataaatcaagtcatctgagcactgagaagtggtcactggattagcaacatgaaggaaattggagaccttgataagctcagtttcggcggagttgattggagtgggttcaagagagaatagggacagagggacaggagggaatgagcccagagaattctttcaggaacttggaccctccaggggaatcaggaaatgaggcaacagttttaggatgggttccagggcccatagacctcaggatatctgtcaactcagccaggaaaaaaagtgacatcttctatttcatctacctctcactgacaattagcatttccttcaatcctgaatgtaggcagccacctacagcaatatgaccagtgcctgtgccttaatcagcaatagagaccatgatattttgcatcgcattacaggcgttgcagatacctgcaaaggacatttatcactctaacaatttcaaatgatacttataagatgcttgctagacctcatgatgtaatgcattaataaggaaggtcgtccattactaggaacagaattgcactaaaatattttgataactatgttttactataattcacttcctttataatcctgcatgttatgtgttatattacacatttaaaagtattgtgctgagaagaatacatcagcttcgccagattgccaaaggaatcccaggcaatccccatcccgccacccagaacaacaccgataacaaaaaactaaaccaaaagagttagaaacctctgccagtgggatgtgtaggcaagagaggacccttgttttgctgttgttttgaagatgagaggcatggaagcatgtttgcatgcctgaggaaatggttcagcgaggagggaaacatctgtaggggcagtagggatcctgtgtgcacatggagagaccagctctgaccagcatgcagagaactcactccagaacgggaggggaggcgggagcaggaggctgggggagatgtcagtgggcaataacgcatgttctgagtttgctccaagtttctcagggaaataagaagcaacatgatgtcttgagacaggagatgggggaggaggtgcgggaggcttgagcacagaggaggagaccatggtcatccaggagaatgaccgcaggcctggaccaagtcaaggggtcaagtgctagtcagtgccgggtgcaggtggggcaagtggtcctgcgggtaccatagactatcacgccggacagcctttcccagcaccatcaactgcactgcgagggtcccaagtggacaaagggctggactggacctggtggggattttcctaggggaaaatgatgaaggcagacagccaagggaaatatgcgtgcacacaaaggtgtgaacatcatggcgggccgtggcgtcaaagctgggatggagggacattgaggacaatagagaaggtctgttcatcgtggagaagtcacctggatcagtggctctccaccctcctgctgtagccgcagcccttggagagctttaaaaagatccggatgccctggctacctccagagattctgattcgctgactggggtggggtccatgcatgggaattttcgagctcctctcccccacccggtgattctgatgtgcaggcaggtttgagaaccaatggcttatttatttcattaaaaattatttttcactctgttggccaggctggagtgcagtggcacaatcacggctccctgcggccttgacctcctgagctcaagtgatcctcccgcctcagccttccgagtagctggaacttcaggtgtgagccactgcacccagccccgctggcttcattgatttaactttttttattttattttattttatttttttgagacagagtcttgctctgtcacccaggctggagcacagtaggattacaggtgcacgccaccacacccagctaatttttgtatttttagtagagacggggtttcactccgtctaggctggtctcaaactcccgacttcaaatgatctgccctcctcggcatcccaaagtgctgggattacaggcatgagccaccaccgtacctggcctgatgtaacttttaaaggtcctattaggagctttaaagagtccaaaacggtttaacagagagtcatagttcagatgtctgttctgctgggcctgcctgctgagtgcaggctctctttgggatctcctgagatggagacaggtgtctctggcctgtccctggaatattgtctcacctacccataaggctaggctctcccactcccttcgcttgaaatcctcttctccagctacaatcttaccttccctcctgtggccctgcacccttgccttctgccatctagaaaaagtggttgggggggtggttctttatttatcttgctgccttctggctcttaccttcccagagccccacggaagcctgttcttacaacctgggtcctcttcctgggaccccagcccactgtgggcactgagcctccctcattgttaatcttggccaagaagttaccccacaggcatttatattttaatggatgactatttttttttttttttgagtcagagtctcactttgtcacccaggccggagcgcggtggtgcgatctcagctcactgcaacctccgcctcccaggttcaagtgattctcctgcctcagcctcctgagtagctgggattacaggcgcctgctaccatgtctggctaatttttgtatttttagtagagaccaggtttcaccatgttggtcaggctggtctcgaactcctgacctcatgatccacccgccttggactcccaaagtgctgggattgtaggcgtgagccactgccctcggcccatggatgacctttgaaaacaaatctcctcctggcccaggccccaaagcatacactcacagtggtgagaatgattgggtgagtcttccagaaaagcctgtgatagtttgatataaagacatttagaattaattgggtcaggtatgagatttcagattgcagaaatccttgtgtaagcaaaggccttgcagctaaagtagtgcatggcaggtgtggcttagcctttagacatacacacagtggccagattgtgcatttgctctgaagagtaccaggccctgtaggttacctttgcctgctctcaggacttgctagataatttgcagaacccagtgcaaaatgaaaatacagaaccccttgttcagaaattattaagaatgtcaagatggcgtctgcagaacatcaagccaagtgcaagcctgtctgagcacggggctccctgtaactgcacagatcatgtgcctgtgaagctgtccctgcctgctatggacatgctgggaactggacattgggattttccccccttaaaacaatgagtgcattgagttagaatgttgaaaggaacagagacgctcttgcagtgttctgtagaatcgaaaatatggtttcatatgtttactttaccttcatttaagtgtagccctgatgcctctgcgaatatctgccatggaagagccttttaaaaacaaagctcttgctggtctccagtgcccaagagtggccgccagtggaaacagacctggtgttctaaatctcagtttttgtttctttcttcttccaagaaagctgtagatgagcatgtgcacttccaggcctagaagggaacagctgcctctgggtggctcgcctctttgcacaaggggctcagctcagagcttcccctaagcctggcaggtccccccgacacttctcttgggaatgaagtggacaaagtgagtgaatgagcctcagcttctcctgtctttttatagagtcacccgacagggagagataaaggaggtggtagcagcttaggcccaggagccctctcagcaaatggcccagagtagaaaattccccacactatgttgctgttggtcacccggtgaaaagtccctggccctggcagccacttgtcctgcaaatggtgcgagtgaagaatccacagattagctggaaggaggaacgtttgagtttgaaaacgccaagaatcattcctgaactggcaaggctggccacctgcgttttaaaaacacattggcactagccttgaaaacagacttttagacttcttactctgcgtaatgaaagatcttttctgatatataggcaacagaatgatttttttaaaaacaataatggacatattccattttattgatctttacctaaaaactaaaaactaactggaaaacaggaaatatttaatagtgacattttcatagcaccaaaggaagaatctacgtgtcttcctttttatagatttttctgtagatgtcttaagaagcattgaaccctttatacagatgggtaaataaaacacagtaagcttgagatatgcaaatcagattggagccagataaggatgggggctggcgctggcttcaattctgactaatcttgggcaagctgctcagcctattactcactgtctacacaggaatgactgtctacataggaatagctcctctgcagagacatctagaagatgctgagataatatatgtaaaaactgacaagccctttgggacagataccagcaaatgcaaggcgtatgctatggaagttttatcatcctaacagataagcccgtccccaactccagtgagtgactgagagacacgggcatgaacgctgagctcagatgacagcatcttttcacagcagacctgggcccagcccctggaagcacacgatgatgaactgtcctctggtttcccaagacttcaaaaatgaaacccagtgatcaagagatgtttggctttgaacactgcgggaattaaagccagcacccagttaaagccagtgaggacagcactccaaggtttggggacggtctcaggacactaatcctggttccttttctattttgcctgggtccctcctgcccatcctgggaagccgtggcagctgttggggatgtggggccccaggtaactgaaggattaactcacgtctcaaattgcatggcatttctcctcttcagcaccattttttaccctcattgagagagatctatcacttccccccctctcctgccatgccaatatgtgtctgtgttggagggcaggggtgtatttagggagcaggagaatgttcccaagtctggaaactcggaacagtctgcctggccctctttgcagaaaaacgagggagtcccagcagacagaagggggcagtggcgctgagctccccgagctgagctgtggcctcaaaacactgaacagattcagtccttcctcccaaacaggcctggtaagcgatgaaaagagttctgcccaaacactcaggaactggattattgtcgttcctggctcattaggagcctggctgccctcatgccagctgcgtggggtcctctggaggccacccagaccagcctgcagcttcctttcctgtaggggccagcacggtcccttcctctggagaacgctcggacccctggctgcatgcacatctaaccggcagggcctaagggcttccaaaacagatgactgtcaaccccagcccgcccaccccacatccacagcttcaccccaaactcacatgcagaaaacctcgagtctcatcttcctgttcaggtcccttgccagccggagccgctctggagcctggctggactccagctcccatgtgcaagaggactcagccgggacgctgccaccctcctgccttccctcttctgccaaccagacgcttccaggacggagtatttgagagaaaattgtctagacaattacagtgttccttagaatggcctgcgtgggcacacgtgccacttggttagctagcatgagaggaggtggcttggccagagcagacattcaagaccaaccagaaatgtcatttctgcactgtggaaaaaaaatgcacgatacacctgaacctgggcatctccttcctaacacgcgctcaggatcaagcctccccttcccagcctggcagggttgcagggcgtccatagtccagcctacgcctgcccaggctctcggctccgggtccattggctgttcacactcacttccctgtgtcctggaactgcctgattgttgtagattactaaaaatccacagctcattccctcctgcgccctgaccacctgcccacagcgactgtgtcctcctctgagccaccacctggcggttgtcctcacactgctttggacttttctgctattgagtaactcagcttctcagcctttaggctgctatgggccctagatgcatgctggtcgattctgatcaacgagcaactgcttttgtttgtttgcttttttctacagctgcagctgtgggtgattcggatggtctgttggtggaatgtggagctggacgggtcaaggagcacagtgtggaaagagggacaatttgctacaagttggagataagagacatggcatactgtgaaaccagtgctgacggaagaaggtgactttcttggaaggtcaagacacttgcttgacagcgatgtccaggagggctagggagagttctgctggaagtgaaggcagcacctgagggtggctgagggaactggtcagggctgggaacgcctccagccctttgaggaatgattcgctgattaagagatgtttggccttgaaaattgcaagaatgaaatctcttggtgggaatgtgtagccaaaagccagcaccctgagtggctccaaggtttggggaccctctcaaggcacaaatcccagttccttttcaattttgaaaatcgttgtgggcgattctggaattgagaagtgtgctgagagccatggatttaacatgacaagaatttccgccccttcgtcactgagcacaccgcaaatgctccagggccagggacttacttgggcttctgcgtgtcttccacagtgtgcatcaatccgccgggctctggttggtgtttaaaaaaaaagatgcagcgaaggaatctggtgtggacaaacgccctgggcatggaccaaaagcctggcccttgtgtccctggcaatgggacggtgaaggacagaaagacagcacatccagtagtgtcaggagcttggagcaggcattcggaagcatctgttaaatgttattgatggaggattgacataacccacatctgcatagcttttttggtctgtttttggaagtgaacagtcacaaacaaaaacaactttggttcaggtcatttataggcccagatcctctatccttagaggtttcccaccagatatactatttcactatctatgccaggaaagttacgtaaaaccacgcagaattttacctgacaacgaaatagaccttttcgttagatcctccaccccacctaaagcagttacacaggctgaaatgaaactgttaaaggaatgaactaacttggagatagaatcatcgcctttgctgaacaccattttaagaatattggaatatataggggtaccagcataatagtaaaatgtgcccatattatctataattttatgctgggcactttttagaaattattttttataactttgtctttgagatgatttggctacaagttcattacatttagtttacaactggctttgatttcttggcattcgttgtgtattattaggaaaccccgcagagagaaaatgtaaactccaaattgctttaaaatattatgatagtttttagggatattacactgtgacagtgaatgaaatggacgtaacgttctgttttgtagatattttgtgaaatctttattagtcttgattttctttggaacaagtcattcctgttctgggctgaagcctgaaaattccctgacctgtgaccctggcccaaggctcctcttggataaaacagtgtttcctggaccagagggcaaagtcacagaaacatgatgtgacgaaatctaaatagaaaggtattgatttgttcttcgttcatcaaatagttattggactccagcacgtatgagtagcagggagcctggctagcactacaccttcccctcctgcctctcagggtcagggccacaggcacacacagagcgagggaaaatgagggggtagagaggctggtcccgagtctccagcccttctctcccaatcctctccctgagtgggcagggaactcttctcttggctcctccaacttccatcaacgtctgcccttgggtctggttttaaactctaaggtgtaaatgactcataatggctcaacattttgtccctcccaagaggtatttttaagtctaaggaataaagatttaatagtaaaacttcgaatgccaatcaggggtaagtgaggatttggaagaggaaggtcttgagcattttcctaacactgctaaaatcatcccattgagttagggcagcaactatcctgatgggctgggtatgatggaagttagtcaatgtttcaatagatggatggatggatggatggatggatggatggatagactgacggatggatggatggatggatggatggatggatggatagacggatggatggatggatggatggatggatggatggatggatagatggatggatacatagatcacctttattctgatctcaactggtctttgaagcttgattcattttttgatttctcacggagccagactagggtctgacacattaggaagctggcaaaagtttgttgactaaacaaattaatgaagggaaaattatgtatgcagagatgcctggggtttgggttaccgttttgggtcccctttgatttgagcgacacacatgctgacaacttgagtctgaagttagtggatccttagctaacttgctagagtaaaggttgtggtaaaacttgaccttgctctattcatcaacagcatatcctgtgaaagtcacgacgcttccatgaaaaccttggtgctaggcctgtgatatctttgcagaggtctgacctaaggagactgcttgtgtcaatagtaacaacaatcacaattgtcctgaacacaaaggcagcattctttgtgtgctagctgtggttttaagcatattacgtctatttactaatttaatcctgaaacagcctttgctttaggtactcctattaacctcattttatggatgggaaaatagactgtgagaagtgaagtcacccgcccaaggtcatacacctgtaagtggtggaggcagggtttgaaccgagcacactggcctcacttcgtgggctcctaccactacgctgcctcatgttactaccctgtatccacctccagaatgagttggcagctgcaagttctccccaaggccccactgcagcccttgcatctcagcatcagctccttgcacggccaggtggtgttgtttctgactcggggtctgcatctctctctgcgccgctgggttcaggaggccctgaggagcgagcccggtccagtgctagcttcgcagctcacagcccttgggcaaatgttacaactggagggctgcacaaatgcatcatgtggtttcaaaccatgcgtctctctgagcaggaattgctggaatgggcctcagaaagttcctgaccctttgtctggggtcacagggtctgtgtccagtgaggcctagaggccacgtgaggtccagagagagaagcacaaggcagctgctgaggcctcataggaaccatgcggtgaaggaaccagggtttcttctttctccatggcaactaggagtgcaggtcagcctcggaaaaggatcctccatctttggttaaaagaacggtgagcccaggtttggtaatgatgtagctgtgtgagttgatggatgcaaagtgcccggcgtggtgccttatccatcgtaggtattgccgaaggagagcttttgtcaccccttcctggagaggggtgttgtggtttgtgggttgagaccttttggattcctggcattgacaatggcactatttggggtggggaccttcttgttggaggagtctccttccctccctgctggtgatataggcaggaaaagaagccaagaactaggccaattgcaataaagaaagaaagaagcaccttctgagcctctcttgccctgtaaggagccaagggggacagggccagatacggacccactgcagggatgggcagtctccgcccttcactgaggaggatgcaggacttatggccccactgggcggcagggacacaggaacctagactgtccatgctcagacacggtctggatttagaaccgtaggccttggggccgttttcaaaaaatagaccctttccttaggaaaatcccacaaaactgccccaaagacgagtgaggtaggaagagcatgaggctcggattctatttacgcatgcatgtccattagattctggattcaaaagccccatgttcttgggtttaagattgtactttctgacgtgaacagtgaattgcaaattcagacttaagagatggttacttttccaccaagagaacagccccgaaacttggccagagcattggtgttttggtgctgctgtaacacagtgccacatgctgggaggcttgagacaacagacatttgtctgttgccttgcagttctgaaggccaagagtccaaaaccaagacgctagcagggctgtgctcctctgagactgggtagatgccttcctggcctcctccagcttctggtggtggccagcaatccttggcattccttggcttccagcatgaccactccaatctctgcctttttcatgacatggtggtcttcctgcatgtctctcctcacacgtcgttctcttcttataaggacacctgtcagattagatgagggccaattctaagaagcttttttttttcttttttgagacagagtttcattctttcttgcccaggctggagtgcaatggcgtgatcttggctcaccgcaacctccgcctgccgggttcaagtgattctcctgccttggcctcccgagtgctgggattacaggcatgcaccgccatgcctggctaattttgtatttttagtggaggcggggtttctccatgttggtcaggctggtctcaaactcctgatctcaggtgatccgcctgcctcggcctcccaaagtgctgggattacaggcatgagccactgtactgggctgataagggccaattctaatgggctcatcttaacttgatgacatccacaaagtctctgtttccaaataaggtcacattcacaggcaccagaaggtagggcttcaatatgcattttgggggacagacttcacccactgacagccatatgtgttctttacagttgccactatttctatgacttggagtgagactgtgattttgtttttcttttttttttgatggcgtcttagtctgtcacctagtctggagtgcagtggcgtgatttttggctcactgcactctttgcctcccaggttcaagcgattctcttgcctcagcctcccaagtagctgggattacaggcatgcaccaccatgtctggctaatttttgtatttttagtagagacagggtttcaccatgttggccaggcaggtcttgaactcctgatctcaagtgatccacccgcctcagcatcccaaagtgttgatattacaggcgtgagccactgtgcctggccaaggctctgattttcgttaggatcagacggatcacttctgtcaccagcgatacctgagtacaggttaatcaatacagcaagatgttgcactagtgatcgcagcagtcaagttcatttccaaatacagagcgaaagcaaggtgccttcccaatcctctgctctgtcctgttttctgtctcgggacaccctgtcatcctcagacaagtgacaatgaagagacagtaaaggcaaaccaagtcactgtccaaaaattgcaccacctaccttggagagcctctcatttcccatcagatatgaatgaaagatcagatataaacctgatgggaaatgagaggttccatttccttttttttttttttatgttgccaagctttatttaggctgtaatggttacagataacacacatctaaccctatattctctgcgtcccatgcagtcccctgagcaggctcagctaccctttccctccagtctcacttcttgtcttcctccttcttgtccttcttgccatccttggtggcctggcaggccagggagcccacagcgtttcaaatggcttcattgttgggatccacacctgggaggttctccaggacactctgaaggaactcaggatcctgcatcacgtcgtaatcatcctcctccttggctggctggcaagtgtccatggctgagctggcatcaatgtctactgattccgcctggccaaactctgctcctgcagggacatcttcatgacataagcaatcccctcttccttaggtcaggaagtccggtatggccaaactcttgttggctaatggtcatcttcagcaggacctcgtctgagccttcagtcccagttgtagcaatcctggcctcagcagcagaggctgcagctgctcgtctgggctcctcatcctgccgctgctgctgctcctccatagaaacccgagggccaaggccagctgaggatcagcactgggatctactccaaattcaaagtcactggcaccgagacccagcatggcacccccttccccagccaaaatcggagaactgatgagagcatcagccaagctgggcccaggaggcactgccaccagatgagaaccgcttccatctttgccattcaacgtgtttacaaaggctgtcagcttttctctgttcacctcctcttcccccaaatttatcatgtcaacatttactttctccttcttgaggaatttagccagtttcaccagatccttctcattgcctttgggcttcccacgaaggcaatgatatgcgtcttgtgattcttgccccgtcagcgcttcagagccagatgggccatgtggatgccagtgtagaaggtgatcttgcccttgggttggacggtgtgtagcttggacaggatgcggccggtgtctagagtgagtgtggtcagcacttcacagtcattagccagtgtgatgagggccatgttgttctcagggttgctgtggattttgtttaattttttttttttttttgagactgagtcttgctctgtcacctaggctggtgtgcaatggcgcaatctcagctcactgcaacctctgcctctcgggttcaagggattctcctgtctcagcctcccaagtagctggaactacaggcgcctgccaccacacccggctaatttttgtatttttagtagggacggggttttaccatgttggtcaggctggtcttgaactcctgacctcatggtctgcctgcctcggcctctcaaagtgctgggattacaggcgtgaaccactgcgcccggcctgttgtgggttttgaatgacatactatgttgacagcgtcttgctgggcctgcagctgggtggggaagaagtcctcattctgcacatactcactgttgtccacacacaccatagcgctttccaacaccatcctgccaccctcctccctcccatttcttgaaataatccttcatgtataacttaggttaatagtgcctcatagtctacttagaaagaatcagatagaattttctttagtaaggaaatttccaaatagagaatagaaaagttaattgatggcaatgtatttaatagcgaggatcagtgaggaaatgaattaaagaggttccttttacacttttcttctctgaagctaggtacaccttagttcatgttgcagcttctttggtgctgtcagatcatagttggtatgaaatgggaagtttctgaaagtcagatgacacatttgtgaaatgcaacctcactgttatctacccggcacccatcatttagctgacaacaatctcagcaacaggcatttcaatgtggtcctgcgtttgctaattgctggtgtgtactcaggacaccggaagatttaaccttttggatgagacagataccagtaacttcccagctgagcttcccaggaatgaactgatgagaagtgacatccaaaaaactgtctcttaaaatataaagagatcaaaagcatgaagtagagactcaaacaggtgtgtgcacactcaccttcatagcagcattatttgcaatagtcaaaaggtggcagcaggccaggcgtgcactgagagacgaatggataaacaaaatatgctgtaaccacacaatgcaacatccagccagaaaaaggaagttctgacacatgctccaacacggctgaaccttgaggatgttatgttaagtgaaatatgcccattgcaaaaagacaaatactgtgattccccttccttccttccttccttccttccttccttccttccttccttccttccttccctctctctttctttttgagacagagtctcactctgttgccaggctggagtgcagtggcgggatctcagttcactgcaacctctgcctcctgggttcaagcgattctcctgcctcagcctcccgagtagctgggattacaggcacgtgccgccatgcccagctaatttttgtatttttagtagagacggggtttcaccatgttggccaggatgatctcaatcccttgatctcgtgatccaccctcctcggcctcccaaagtgctgggattacaggtgtgagccaccgcgcccggcctgtgattccacttttatgagatacctagtatagtcaaattaatagagacagaaggtagaattgcgggtgccaggggctgagggcgggggggtggggagttacagtttaatgggtacagactttcagtctgggaggaggagaaagctccggagagggatggtggtggatggctgcatgatatgcgtgtacttaatgtcacagaactatgtacttcaaatggctgaaatagcacattttacgttatgtgtgttttactacaataaaaaatacagaaagaggccgcgcacagtggctcacgcctctaatcccagcactttgggaggctgaggtgggcagatcacctgaggtcaggagttcaagactagcctggccaacacggtgaatacaaaaattagctgggtgtggtggcatgcatctgcgatcccagctactcaggaggctgaggcaggagaatcacttgaacctgagaggtggaagttgcaataagtcgagatcaagccactgcactccagcctgggcaacagagtgagtgagagtctgtctcaaagaaaaaaaaaaaaaaatatatatatatatatatatatatatggagagagagagagagagaaagagaatggggggcgggagagagagagagaaagagagagagagagagagagaacatccaaaactgatattagccattctgaattggactgtcccatcaaatgtggtcttgcagctgtccacttgtttaggagtaaggagttttattggaatgaatgttctcagatattaatcaacacagtacctccctcccttctcagttccagctgatgctgagacaccaatggcaaatcttgatccatgcccaccccaggaggatgagcgacagtcaggattttgggccacaacacatgcagcttcctgcagtgtcctcttctccagggtgtgctgtgggaaggcctcaccagcttgggcaggggctcagctctcacgggacgaggcagctgagtagctgatggcagggcctggtggggggccggggacgacggcagagtcatccactgccactctggacaaaggccaaacctgtcctggatgccacctagttgctgccctcttaacctgaccctctggcctgcctcagaccttataatttcctaagcacgtctgcatagactgttatttagtcttgccaatgaccgcgagggagctgttatcactgccaggcatcatgtccagtcctcacggctggccataagaagatccgggcctcacctgggcctcccatccaagccccaagttctttcctcccccagtagccagccagagccaccaaccctccctcaagccatgagaggaagcagctgtgatgagcactgagccctcaaccaggagccgttgaatgaacaggtgtgaatctcaaacacaattttctgcaaggtcttctccactcccaggcccagctgtatctcttacggctgagggatcaggatgactttgctgcggcctcgctggaagcatctctctagattgccacggaccaggcagtctagagatgaggaagtcagaggctccacagacactcagatatcatcagatcccctcccaaagggagaagaatgctctgttttattttattctatttaactttgttaatttaatttttagaggcaggatcttgccctgttgcccaagctggagtgcaatggctcgaccgtgggtcaccgcagccttgagctcctgggcttaagagatcctcctgcctcagcctcccaaagagctgggactacaggtgcgaaccaccatgtctgctagttcaatttttttttaatttttttttttttttttttttgtgacagagtctcactctgtcacccaggctggactgcagtggcgtgatcttggctcactgcaacctccacctcctgggttcaagtgattctcctgcctcagcctcccaagtagctgagatgacaggtgtgcaccaccattccaggctaatttttgtatttctagtagagatggggtttaaccatgttggccaggctgctttcaaactcctgacctcaagggatccacctgcctcggcctcccaaagtgctgggattacaggtgtaagccaccatgcctggccaaaaaatttctttacttataattttttgtagagatggggtctctctatgctgcggaggctggtctcgaactcttggccttaagagatcctcccacctgggcctttctctgactgttcagtttgatacacgtggaaccaggtttgcttgcaccctcctcaccgcttctgctttctgctcctcccaaacacatgaacatattcagatatgcatcaacgtgcacatatgccaacacgtgtgggcacacacatgcaagtgcacagacacacacacacacacacacacacacacacacacacacacccctggacacacacacattgttttctcaaaatgacttttggcagcagcaaagccaaacctttccaaaggccgaagaaaggccttcatttgcatcacgttaacttggggggctgcatctcctcccctgtttttagtacaaaacatgagtcaacggttcaaccctcaccccagcaaactaattagggtcaatgtgattaaagggctcagctctggtgcaggaactaggatccccagatatcctgaagaacttcactcacagtctctttcctaaggtttgtgccctaaaacaaggcactgactcactgtgttcagctcttaataacctcaagaacctcccttcccagctgggcgcctcttccataaaggggttaccagaaaacaagaagcaacacacaaagctttcaaaagcgaaacggcgaggaatgtagtgcgtgtcagcgagtcaacgaaaataagaaagggacctgatgtcaagcttgacacgatcattttaatttccgcgtactttttgggtcttttcatgttggcttcatggaaatttatgtttgctgagaagactgtatttgctacaggatctcgctgtgttcatttagcctggtaataaaaaccatctgcctgaaatcctttttggaacaaggaggggtataagcaaataagcaaatggtcataaaagatctggagaagggtggggctgtgtcaggaaagtggggagcctggagtacatgcctcgggagtggcgactgtaggaggccggggactactgaaggtcatgtgtgaggctgtacagctttcccagtaaatatggtgcatgttgggaggacaggtgcatgtggacaggccgcctctcttcccaagcacccgctctgggctggggtctcaccactggagtaagaacagtatcatgatgcattaagtgaggagtccttgacgtgggttgaatagtgtccctgcaaaactcacgtccacccagaacctcagactatgaccttctttggaaatagagtctttatgggtgtgattaagttagtatgtggctgactgcggtggctcacgcctgtaatcccagcactttgggagcttgaggtgggaggattgcttgaggttggtagttcgagaccagcctgggcaacatggcgaaactctgtctctaaaaaaaatgcaagggccgggcgcggtggctcacgcctgtaatcccagcactttggaaggccgaggcgggtggatcatgaggtcaggagatcgagaccatcctggctaacaaggtgaaaccccgtctctactaaaaatacaaaaaattagccgggcgcggtggcgggcgcctgtagtcccagctactcgggaggctgaggcaggagaatggcgtgaacccgggaagcggagcttgcagtgagccgagattgcgccactgcagtccgcagtccggcctgggcgacagagcgagactccgtcccaaaaaaaaaaaaaaaaaaaaaaaaaaaatgcaaaaattagctgcagggcatggtggcgagcacctgtaatcccagctacttgggaggctgaggtgggaggatctcttgagcccgggaggtggaggttgcagtgagcagtgattgtgccactgcactgcagcctaggtgacagagcaagaccctgtctcaaacaaaacaaaacgaaaaaaaggtaaagatgaagttatactggcttccaatggctgctgtccttacaaaaaaaggataggcatggaagaaggaagacagccacgtgacgacagaggcagaggtggggatgatgcgactacaagccagggaaggccaaggagacctggagccaccaggacctgggaccagcaaggaaggggcctcccctagagccttcagagggtcgtggccctgcaggcaccttgattttggatttccagcctctggagctgtgagagaatgatgttctctgtaggaggaagctctctgagtccccctctctgcctgggagctctgagccactgtgtctttgtggggagagacgagtcagacaagatcgcaaagaagcatctcaaactcttggcctttaaagcaggcattgaagaccatgagcaggacagaaccaaccctgagaggatactgttgagcacgtgttttgtttaccggtttgtttttctgcccgcccccggggaggaggtcgagcctcctggactcaaggaaataaaagggcagcctcctggagagcagctgtgaggggctgtgagaggggccttcgtcctgtcctggtctctgggtccaccccacagttgggggtgtcaccacaggagtcctgagctggggtctgtgagtagagagggctgctcttctgccttccctgggaggcagggcacggaggagaaatggcaagacacattaagctttcttaatgtgggttctagtaacataggtttttatgttctcagcaagacagggttcttgtaagccaggcattggtaagagataatcttcaaggttcctttagctctgattaccatataaagacctgggcctgcaggtctgatctttgaggttcttataatccagaaaactcaggacactgcatgccagtgtcagcttcaaggagcaagggaagctcagttcttccagtcctggggcacgaggaggaggagggaaggcgaggaagggaagcctagcggccgcacacttgtcatagtctctctcacagctaacattgtggagcgggagcctctgcaaaatgggctttttttctgccccctgcttggaatcattggaggaggccccatttcagaatgggagtgtgggtgggtactgaaggaacacatgtggctggaggaaggtgggatggatgagcacacgctgggattcctcacagccttcatctcctccatggtgtggaggggacccaggatcctcatgtgttcccaaagcaggtatagagtggctgggcaccaagtcctggctgggagccagtggatgccaagagcccacttttgccaggatgggttgggaatcccactagatcttggggggatcaccatggtggacttgctcacacatgagagcccccaagagcaggacctcaggatcttctgcggggacatcaactggattcgcaaagagcccacccgtgctgggtggacacctgctgggcagcagaggctgatgtcggactagcctctggcacagaccgggagaccatcttctctcccagcgggggactgtgagatttcctgcacactggtcgccatgtaggatatgatgccagggaagagagaaacaggactgacgagagtggtatctacaaacaaatatttatctaataaggcccatttcaatcaaagaagcttgtttcaaacagacagggctgagaggatattcctaacaaattaaagtcccctgggctggccgtgggagagggtctcacgaggaggagaactaaagaagctctgtggtccctgcacactggcatgttcgagagaatctgaactgttactgccttggcatgaaaagatgattgttaggggctgaactgtgtcccctcccaaatttatatgttgaagtcctggcccccagtgccttagaatgtggctgtacttggagatggagtgtacaaagaggcgattcagttaaaatgagttcgtacgggtgggccctgacccaatctgactggtgtcctcccaggaaggggagacgagttcacaggcacatgcagggggatgaccctgggatggcacagggacaagacagcatctataagccagggagggggcctcaggagaaacccaccctgtgggtgccttgatctcggacttccagcctccagaactgtgagacaataaatgcctgttgtttaagccgccctgtctgtggagctttgttacaacattcttggcagatgaatacaatgattctgctcaaggaccacaggtcttcctgtgcatccccgtagacatctgtatccagacgaggaccacacaggaggcctggatgttcccaaacttccctcagatgcctgctgttacctgagttccctgggtggaggaacaaatccccccacacagaaaggggaaccagaggcccagcacggtgcctcacgcctgtaatcccagcactttgggaggctgaggctggtggatcacctgaagtcaggagttcgagactagcctgaccaacattgtgaaaccccttctctactaaaaaatacaaaaattagctggacatggtggtggacacctgtaaccccagctactcaagaggctgaggcaggagaattgtttgaacccgggaggcggaggttgctgtgagccgagatcgtgccattgcactccagcctgggcaacaagcgtgaaactccatctcagaaaaataaataataaataaaggggaaccagaaagtctgattggatcaagtttatcctgaattgactgaattttgtttaattgtcaagtttaagaactccattatggggtgggatgaaggcttgggacagaaatcatattcagttatggaaaagggaatctgaaattttttgctacccatttgagttttgaagtctcaggaaatcacactgacttcatcaaaaaagcaggtgctgccatgcacattcgatcaatgcagatgctgatgtttacaatgagcagttgcagcttccctcctgacagcctggagcttggggctagagcccctggcccacaggctaagaagcaagggtgattttacaacccatgcactgagttagagagtgttcttaccccacgaagttcttgtccactcagaacctcagaacgtgaccttatttggaagtagggctgtaggtgtaatgagttaagatgaggtcacagtggattagggtggtccctacaccaatgccactggtgtccttataagagcagaggagacacagggggaagagggctatgtgaagactgaggcggagattgcagctgtagggcagggaatgctggggatggccaggccccactggaagttggaaggggcaaggaagccttcttttctagagcttcagagacagcatggtcctcttggcactttgatttcagaattctggcttccagaactgggagtaaatttcggttgttttaagccatcgaatttgaagtactttgttacagctgccctaggatgctaatatactgtgttataaaaatcagggtttctgccgggtgcagtggctcccaaaatgcctgtaattccagcactttgggaggctgaggaaggaggatcattggagtccaggagtttgagatcagcctgggcaacatagtgaaaccccatctctacaaaaaaatacaaaaattagctgggcatggtgatgcacacctgtggtccgaggtacttgggaggctgaggtggaaggatctcttgagcccaggaggctgaggccgcagtgagccatgatcacaccactacactccaactagggagacagagtgagaccttgtttcaaaaaaaaaaaaaaaaaaaaagtcagggtttctagagcctgtgctctatctgaaatgatttagaagcctttcttctagggacgaatccctccaaatttagaaccaggcaggagatttaggcacaagagcatcccctgctcccccttcctagtctaaatcagatgacatggacccctgagagcgaatgcttgcaaatcactcaggatacccgcccagccaatggagaagaaagcagaggaaggaaggaaagaagggtggaaggaaggaagggaggaggggaggaagggagggaggaagggagggaggaaggaagggagggagggagggagggaggaagggagggaggaaggcagggaggaaggaagggagggaggaaggaagggagggagggagggagggaggaagggagggaggaagggagggaggaagggaggaagggagggaggaaggaagggagggagggaggaagggagggagggaggaagggagggagggagggagggagggaggaagggagggagggaggaagggagggaggaagggagggagggagggagggagggaggaagggagggagggagggaggaagggagggaggaaggaagggagggagggaggaagggagggagggaggaagggagggagggagggaggaagggagggagggagggaggaagggagggaggaagggaggaagggagggaggaagggaggaagggagggagggagggaggaagggagggaggaagggagggaaggagggagggaggaagggagggaggaagggagggagggaggaaggaagggagggagggagggaggaagggagggaggaaggaagggagggagggagggagggagggagggagggaggaaggaagggagggagggagggagggaggaagggagggagggagggagggagcgagggagggagggagggagggagggaggaaggaagggagggagggagggaggaagggagggaggcaggcggcaggcacacgcacacaggctctctttgctttccaacaggaaggggctcagggtctgttttcttttcccttcctttcagatggatctttcatatctccaataactcttatctttcagcaaactccaacaggccccaaacgagctgagaaaatatccaacttcaaaggttttgcacaaatcatcttaaaggcctgacctaagcccggaaagccggaacgaagcccagaaatcagtcctcatttcatcgccgtttagccaagacacctttcccgtccacagatcacatctgcccccttctgcccccgcccaggtcccaaccaccttgagacacctgcgtgatccatcctcaaagcaatgagttaggagccgcactcctggtccttggccggtggcttcagtgttattccggggggctgggtgggggcacctgtggggactgccccgtgaggctgtggtttaatttcctttgctactttccttagctcttcagtctcagtctcagccactgaaatgtgtcttggccactggtggtacagcacagggtgacactgttgtcagcgagaggaagatgctttttttttttttgagatggagttttgctctgttgcccaggctggagtgcagtggtgcaatcttggctcactgcaacctccaccgcccggggttcaagcgattctcctgtctcagcctcatgagtagctgggattacaggcacccaccaccatgcccagctaatttttgtattcttagtagagatggggttttgccatattggccaggctggtgtcgaactcctgacctcaggcggtccacctgccttggcctcccaaagtgctgggattatagacatgagccactgcgcccagacaggaagatgcgtttgtgagccgggacaattgtgagtggaaagagaagaaaaaaagtaaaataataatactaataatgccttttctctggtcctggaagatctatatgaacttgtattttacatctcttgtctggatttagctgtgaaagaccagtagaccaactggtgggaaaaatacttgcacggcagcaggttgtttgaataaaataggagatttccagtctcagattggatacatgcacttaatatcagcagacttgttgtgagtataagcctctataaactgagcactgttgcaggcgatggggacgtggaactggtaggaccgatggctaagctctcttcccctccaccctggaaaaaatgaacataggatctggctgtggcagacagcagcctacagaaaggtgggggcacctctcagctggccttcagctccaatacagacacgggaaaaccagtctcagttcaggtctgggccccactggctgcgtctgcctggacaccatcagccctgcacgaaggtggccgctgaggggccctcatgggggctgaaattcaaccaaggcttgattcctgcctgaggtgccaggaacctgtccctttcttctaggtggttcgctcagcaagggtactttttgtaattcagccacccagatgggagtgtcctcttgcactccatccatctggatgaagcacctttattttctaatttggccagtttcagggcacatgacaatcaccgatatgacagaagggtaacctttctggggttgcatcttaggaaatttcattgaaggaggagtagagagatgatatcattgaccacaggactcaagaaataagcccagagcacacatcggttttgtgggggcaatgaaccccgcaactgcgggaaactgaccttcagcactttgatgtgaatggggccattgctttcagctttctccaaggtttttgtttgtttgtttgtcggtcttactctgtcgcccaggctggagtgcagtggtgtgatctcagctcgctgcaacctctgcctcctgggttcaagcgattctcctgcctcagcctcccaagtttttacttgaaacctgcatacacacagcctttttgttttatgggctgggttcctacagagagttatgaatggaggattgagtgcatttaggctattagtagaaagtgatcaagattagaatagagtggcttatctgtgtttagagtctctaaagttgttgcagggggcttgttgcaatgtccgtaccagggccccaacccagacctaccgaatcagaatttcaggaggggaggttaggaatctgtggttttatgtcagcccctgttccagtccacgtgactcttatgcatcatgatgttgagattcactgatttagacacgcagacaataaatactgattcttggactacagagccaaagacaaatcgagtgacgtattctagctcatggagccagctgggcaaagccagcagggatttattgctccttagatgatcaatgctgcccccagggctgctgtcatctcctgatgacgagcaacattttcacaacatcagggggctggtggagaaaatcggggggtctccggagcaaccccgggagcagtactgggcccagaagcctgccccagccgcgcacacagagtctacctgtcttccaatgcgagtcccgcgaggtgaagaattagagcatgttgttcatttataatgtttgctttgcttttggaaacaccctggggcaactcaggcaaggttttcaatgtggtgtttgacttggcttagctgcaaagttccccctttttggtctgtttatggcaagttagcacacggccccatatccaggagcctaacaccagccccagcagaaatcagggagcgggcaaggaagtgaaacattgggagggctgggttgggcttccctgtacccgccctctcagccgggagctcgcctgaggtcaggctgggcaccaggccacctcagactttgcagcctcggacctgttactgcagcccgaataacagtgacgcctcggacagtgacacgtcccgctgaccaaccacagggtctggaggataatttcccaggaaagagatacattccattcatttttttaaaattttattttaaatttagacagagtcttgttctgttgcccaggctggagtgcagtggtgcaatctcggttcaccgcaacctccacctcctgggttcaagcaattctcctgcttcaacctccctagtagctgggatcacaggtttgtgccaccatgcctggctaattttagtatttttagtagagatgaggtttcaccatgctggtcaggctgatcttgaactccttgcctcaagtgatccacccgcctcggcctcccaaagtgctgggattataggcgcacgtcaccgtgcccggctgatacattccattctttagctccctctttcttacatattttcttttctttttacaaagtcaacccactttcagtaggaagttgccgattctttctcatgtttacttttgagtttcaaatagacaccgccttatcttttaataagacttgctatcactgtgccagccactccatttacatcatttcatttcatctgcacagaactctacgcagggggtatgattagatcgcatttaatgatgagaaagcaaactcggagagcttaaatcagcggcccaaggtagcccagctaacacccggggggtgcggctcagccgcaggtcttctcagcgatgtggttgctgtctgcctggctaatggcctgccacatcctgaacccttcaatgtcaccctcatctttccttctctgccttagaagagaaaaggatgatggcttatctgagggctgaaagatttcatccacatcaagccccatttgcatgaaatgtatctgcccagtttatatcagcaacatgaagagcaaagaaaactgcctgtttatattgccacatctgcagggcattgaaatacattattaatgggagtttcagtcaatatctcacttttttttttttttttttttttttttttttttttttagaaaagtgaaaccatgattgggttacattagtgtgagttgtagaaaccaggttaaatctgacctttgggacatggagacggtcatctgacccagggcgggtcacattcaaagagcacagacaaggtccccctgaagtcagtgggacatttgggcctgagactatgaaactgaactagaacttatgggctttagggaacaagcccaaaagctcctaaatttcctccttgaagatctcctcgctactgtttttcttctagatattctgctgctttgacaggtacgccaccccctgtctccaaactcacacgttcaacccagtgatgggtggagactgggaggctctgttagtctctcttttcagtagcctggccctaaattaaagggcccatggttttctctagttgaacacaccccaggctcccagccagcccctggccctcgagaggggttgtttttgatggcaggagggagataaaagtgaatgtattttaggatcttgttactaggccacaaggaaacactggatggaaagtcttatgaatttgaaaagaccttttttttttttttaaatcaaatccaaggaacccaaaaggcgttaagctattgtttaaacatagacccagtgcccaaaccctgcacactagtttgtagaggttggaagaggcaggatggaaggggttaatggtgctattctttcttgaatattctgtaacacaccacaatgagccaaaagcagtcacagggaaccatcatgaggagtagcatgtttttacctatgttaactccaacatccgcaatagctgaaccttagaattattatccgaattgtgcataccaggaaacaacagatttgatgagtttaataacttgtccaacattacaaagttagcaagaggtagggtccagaaatgaacagcgtcctttcttctgcaggctggctcccatgaaatactattcttatgcctgttgaggtctgatgtggtatcacattatactactggaccagctagggggtcaagagcattatgccatctctgtagtatgcttaggggtcagtcctgaaatgagcagagttcactttcagccatgaaaaggatattccgaggaactgatatcttagattgctttcttttagtgcatagacatcacttgagaggcttcatgttactgagacatcttgtaaactttacagctactgttttacacttcatcagcattcctgatcttattatggtgttcacttcaaataatgttgggtgtgtaagaatcaaatgcaaattgtacagtatttgacacggatgtctttaggagccaatatttccttaaatatcatggtttcagtgttatccactaatgctttaatagatagggtttctttgcattcataaatggtaataaagatacgagttgtctactataaaaccaaacacttatatttcccaactactaaaacatctatgtaatcttgaatccatctgacctaaaggaaggaaaatgttctcaacccaggctacacattagaacacttgggaagctttgaaaaattcttaatgaatgggccccactcctagaccaattaattcagatctctgagaagtgtggtctgagaactgatggtttagaaaactgtacagacagttctaacatgcagccagcttgagaactactgggtttagacaagaatggatttttttgttttttgagatagagtctcactctttcgcccaggctggagtgcagtggcacaatcttggctcactgcaacctctgcctcctaggttcaagagattctcctgcctcagcctcccaagtagctgagatgacaggtgtgcaccaccattccgggctaatttttgtatttttagtagagacagggtttcaccatattggccaggctggtcttgagctcctgacctcaagtgatccacctgccttgccctcccaaagtgttaggattacaggcatgagccactatgcccagctaatatggtttggttctgtccccatccaaatctcatcttgaattcccatgcgttgtgggagggacctagtgggaggtaattgaatcatggggccagatctttctcacgttgttctcgtgacagagatctgatggttttaaaaatgggagtttccctcacaagctctctctttgcctgtcgccatccatgtaagacatgacttgctcctcttttctttccaccatgattgtgaagcttccccagccacatggaactatgagttttccatgaaatctctttcctttgtaaattgcccagtcttgggtatgtctttatcagcagcatgaaaatgaactaatacaccagccaagaatggatttttaaattaatggagttaggtctgattaatatcaatgcattaatgtataaatgtctacattatgcattacaataaacagttttgaatataacacaactaaaatatatgcaatgaatacaatacatacagtaagtcattagcttccaggtataagtagatgctcaataaatattactgagttactgaatgaatggcatcctacaaagttttatatgaaaaattatattttgatgaaattaagatgccatcaattgtaagatgtagtatcactgataaagaaaatagattcattaaattatgacatgctatctagtatgtcacaccctaacttcaaaaatgttaaaaaggccagatgtggtggctcatgcttgtaataccagcactttgggaggccaaagtgggaggatcacttgaagccaggagttcaagaccagcttgggcaacatagcaaaatcccatctatatgtaaaaataaaaaaattacctgggcatggtggtgcacgcctgtagtcccagctacttgtgaggctgaggtaaaaggatcacttaagcctagaagtttgaggctgaagagagttatgatcgtgccattgcactcaagcctgtctcagaaaaaagttaaaaacaagaaaaaaatacaatattttgaaattactgtattctctttttctgcttagtctaggccaactgttataccattaacttccactagatgccgctgtgacctgctacttcaggttccgaaaggcaatctgaaagccaattttctccaaggatttaaaattgaaataattcaccccctttaaagacaaaagatattttaaccacctcatattttagggggttgtggctcattctttctttgtgttaagacctatctgaagtatctcatgaagtgtacaattatttaaaaaggaaactgaaaagttttaatggcttgatagaaaacaattgcttcccttttatccacatccccaaatttcacattttgcgtgtaactcatgactagtctgcagtgggttatagagaagagatggtaacactgataggaaggctgatgttgacttcaatgaaataagaagtaaaacttgaaggaaagagtatgacatcttctgatttgaagacagcagatcatggtaccctgtacccatgagtcactgctcccagagataggaaaagctgggtggaaaagaaaatttgggctgataggactgggtcctgagcttgaagccaagcccagtgttaaccctgggcattgacccaggccctccctgactgaaaatctggaagattttccctgctgggtgagaatcactttttcagcaaaacaatacaagctttagggccaaaaggaagcccatgaagcttccagagacgtgcttagagcaatgctgctcaaattcttaccaatctccactatatgagaacagaaatggacagtaagtatctcaaaacttgtataacaaatttaaacaggtttacgtctgctaaatctaataaaaagaaatcaggattgtatttcatatgtctttgtttcatatttcatttttccagtaattcaattcttttagtattttacaaaagtattggtccataatagattggaattttttaaaaaatagcccttcagcccagatagcttttgaagcactgcagacagcccaccccaagctgctggaggaggcaattccaggacgatgaagccatcatactcctgaataatgttctagtagaccaaacagctaagaaagggctgaagaacaggagcacttagatgataaaggacaggatgactggagagctaaaaagaaatcctaagaacagaacacctcggggagtcccagcctctgaacccacagtcagcagctcaccagaacctaacatttctgcaaaggctcagagattccaccattgccactcccagcagttcgcctgcccaatgtagacaatcagcctagcactgactttgggacaagaggatctcaggtggttacagtgaaaagaaaatgcaaaaccactcaggattgcccaagtctgacatatttaggttcagaagagaaacacacagagaggtccattgttaaccccttcctggtttgatccacccaaagccagccggcttggatggaggggaggcgtaaggcactgtggacttccatttatgggtaactgtgagctggcttttgtcttctctgaaaaatgccctgttacactagcatactgtcagtgtcttttttggatagccatttggtaatatctatcaaaatgtaaacagtgaatactcttcaactcagctatttctctgctagaaattcatcccccagttatactcctaaagtaagcaaagacataaataatacaggattcaatactctctggctctttctgagagaataaaactggataaaatgtaaatgtcctttataagagattagttacataactacggtacatccacacagattagtatgcaccattaaaagattaaatgcttctgcagttactgatatgcaaagagttccaagacacaatgttaagtgaaggaagcaagttgaagtgcagtgtgtacagcatgatcctatttgtgtaaacaagaacaaatgcagtcaggtacggtggctcatgcctgtaatcccagcattttgggaggccaaggcaggtggatcacctgaggtcagaagttcaagaccagcctgaccagcatggcaaagccccatctgtactaaaaatacaaaaattagttgggtgtggtgatggatgtctgtaatcccagctatttgggaggctgaggcaggagaatcgtttgaaccgggggggcggaggttgcagtgagccgagatcgggccacttcactgcagcctgggtgaaagaccaagactctgtctcaaaaaaaaaaaaaaaagaaagaacaaatgcatttctgtcatgcagagagaccttctgagggctgcacaaaaagccgttcacagcgatcacctctggggggtggagccaagggtcaaggtcggggaggactttcatttttaacttcacactcttgtatgtggtctgacgttttaaaaagcaaaattgtatcaatttaatagggagcaaggtatctattgcagagcatcaagagttacaagaggccaggtgcagtgcttcccacctataatcccagtgttttgggaggccaaggcagaaggattccttgagtccaggagtttgagaccagcctgggcaacacagcaagaccctgtctctaaaaaaatgaaaataaaaaattacctgagcatggtggtgtgtacctgtagttctagctactcaggaggctgaggcagaagggctgcttgagcccaggagctcgaggctgcagtgagctatgatcacaccactgcactccagcctgggcaacagaatgagatgctccctcttaaaaaaaaaaaagcactacaggaaatggcagcaaatatcagtcagccaaagacacaacctgacacaagcggctgcacaaaatagtagttgcccttaagctcaagggacatcaacaaggaaaaaacacacaactcccagtgttctctcaacccatggctgtgtatatcttttagtgatgagccttggggaccccataaaacccagaggaacatgtggcagaggacccaaggcttccagggattgtggccatcaccaggtgagaaagcccagagacaaccgcttgagtgtttaattactatgtgaaaatggaatgagagggaaggaaattgggtttggttacttcaataaaaaaaggttgaccggacgtggtggctcacacctgtaatcccagcacttcgaaaggccaaggtgggtggatcacctaaggtcagaagtttgagaccagcctggccaatgtggtggagtcccgtctctactaaaaatacaaaaattagttgggtgtggtggcacgcacgtgtaatcccagctacttggcaggctgaggcgggagaatcacttgaaaccaggaggcagaggttgcaatgagctgagattgtgccactgcactccagcttgggtgacagagtgagactccatctcaaaaaaagaaaaaggttgcctggccctggttcataagtagagggagtgtcttgtgtcttgggaaccagtagcactgttaacatttacaaacgggacacacacatttcctgtttaattccaccctgcacagtgctgattcactatgataccattggtctcagaaatacttttcttaaaagttgtatataattaccacatatatacacataaataaaaatatacacacatatatgtgtatacatgcacacacacatacatatcacactctgtgctctcagccagggagagctggggaaggagattgtctttggagtccttagcacattacactatattacaaatgctcttggccgaagagtattctcagtgctgtcctgagttgtgttctgcaaaatgcactgtttattccactgtgatcttcctttctgccactcatttcatgttctagggaacagttttgactcacagttatgggtaaaaggtgtttgagtgattgttctagactcaccctaaagagaccaaggaagaatattatgccaagtgtcaaaaagctactttccaggcagctcaagttgccttcatggaaatgatgaaggaagcagagggtgaagtttaaggacaggtggaaatccttcacaatcctatcgggcatcattaacagcactgtaaggctgggagagatgaccaaggggatttgaaaacagcattagggtaggaagccggaattaagcttataaagacccatagagcacgcagtccttctatgtcatggcctatctgacagatgcgttggggggccccggagagccaggagtagtgggcagagggcaagcaagcacagagccatcctctacagtggtcagagggcaagcaagcacagagccaccctctacaaggacaccggagcactgaggccattgctcttgggaagaaaccaccgaggtttctgttagccagggtgggccagctgaatgtctgcaacatcactgaaaacagtcacaagttggagagacaatggtctttttagcactccccttgggggaagcagtgtgggagatggaaggttctggagtaaggggttatgcctcgaggggctggcttcaggacattgtcctgtgggttggtaggcgtccttaattgtggggcttttgttttgctgagaggaggctgcaagtttgaggcaaaaaatgaattctctggaggtaaagaagccgctgaggctgctccccgctggccctttcttcctgctgggcctttcctttatttatttagagtactcagcctttcctctaggtaaatattgaaagaatatataaaaaccaatagtttaaacagtgtcaaattattatcctgtctccacctggccctgggcatggctgcggtgtgtattgtgctaggttctgactctctttggttgagcaggaggcggccctagcgccacaggtggagatggctgcccacctgctgtgaaggcacttccggtgtccgccatcttgggagcagctcagaccggaaaccacaggctggagaacgcaactgggaatggaaagcaggagtggctctttgtgttgctttgggctgaattaggagaagggtagatgtttggaggtggtgttggctgcagggaagaaggagttagaatgggatgaaaatttttggcccagagaaggggagcagtggttgttggctgaggcatttattgaaggattcccatggagaagatacatatggttgggggcagagtccctgttgagagggagtgctgccagttccatacagaaattccttctccctgacaaccgcagatgtcttagcagcattgcttttattttttatttatttatttatttttgagactgggtctcactctgtcacaggctggagtgcagtggcgcaatctctgctcattgcaacctccgcctcccggcttcaagtgattctaatgcgtcagcctcccgagtagctgggactacaggcacacgccaccacacccagctaatttttgtatttttagtagagatggggtttcactgtgctgaccaggctagtctcgaactcctgacctcgtaatccgcccacctcagcctcccaaagtactgggattacagacgtgagccacccgcgcctggcccagcagcattgcttttagactgacagcttagaaaccaaaagtctgtttactggccacctacacaacctgtcaatccctaaacaacctgaaggtttagtgccctaccatagacaccctgtaacccattaagaggtccagcctttgctacagcaaatggtgtaaactcccacggcccagttatgtccagggctcagttgggtttttggcctctttatcctcaaatggggaaagcatagctctgggccagtcaagcgctgagctgatccaagacattcttccacccgccagactggaaataccggaaaagcggtggcagctgccctcagaggcagtgtcagtattttctttccttttggccagttccgttttgactagaaactggaatcataattataatgctacatgtttacagattttaagtaattgatcccttggagtcctcttttgggggaaaagcattctacccacctcatacatcaggaaaacaagaggccatatggtttggctgggctgggtggtctctggtgtcagtaggagagtggagactgcggcttcaacagttcttgacttcttggcttgtgtccagatctctgggccttgcagcccctagaaaggtgacacatgagaaaccgaagtggaccagaccataaactctcaggagcagttacctctagagaggagggcaggcctcgtggccctgcctgtgcctgtttctcttggagggacaggttggagaggaggaaaaccccttactacaggagtgtttcacctacctttaattaccagttaaaacaaaacattctgtaatgaaaattccccttgaaagaaactccaagttgctgtgaaggtttcatctttcccttttgaatcccaaggtctgcagccatgtaatccaatgttggtctggaaaaatatctggctacagaaaaacccacatggggtgttggggacgccagtaaagggcaggaggttggatcttgtacagtagcccttagcaaaatccttcaggtcaagccctggtctacttattaagaaccctcttaacccttttaataagaggtagatatgttttcttctgattctaccttctctattgccagcaatgtttgtcctcaataaattaatgtgagttggtggtggatgtagaaaaggggagaagggaaacctagttctccgatggtcatggctatttcaagataagggaagtggcagaaacacggagggaggcaggccggggagcctccaaccccaacaggtgaagacacacatagaggcatgcaagtcagcaaacaaattcaggctgggttcccagagggaaatgtttgtgtttttttctaagtgagcaggtgtagttaagcacacccttttcacggtgcgttgaagcagatttccagccctgtttggaagcacaacgttgccatctcaatgggttgtccttctgaacccataatagctgtttacttagaccagatcccgtattgccttgtgtcattgtccaattttcctatgtggattttaccaattcagttgtagatgtcttagtaacagggaccagaatttttccataatcaatagtagtttaaatgattgaacaaaaagtttcctcttgtgtgcaatcagctgaggaacgtaaactaatttcagtctcattcctagtgcctgatttttcttccatcattctaggtttcctgtctggcccacacttcgagagtcctccctgctgcagggagcacatctgtgagccatgtgtttcctttctttcctcctgtacaatggtaatttttttcttagctactacaggaagcccagcagattcagatgtacaagaagccacaccaagacctaagatgatattcactgatgttatcagcaggttgatgccaacatctgcctagagagtggttaccctgagaagtttaccccagttctaagtttggttggtctgttctgaggtgatagcctcgtactgaagtaatttctccccaccaaagggtctagaataggtttatttgtaatctattttatgtagctgtgactgcctcaagacacctcaaagggttattaagagtgtgtgtctaggcatgtgggtaactgttccagctcaacagcctgtgaataccattagtagcccttgaaatggatctccaggaagtgctgactgttaatgactctgccctgatgctcctatgtgagcagaacaaagagataatgtctaagtttgcaggtagctgagcgctctaaattgatgactagctcagggagagggaggtgctgtgccatcctaagcctagaagacatcgccaaaggaacagtgggagattaacaactctcccatgttaggaggttgacttgccaaactgatggaagagtgacaaactgatagactgtggtgctgtgtcccttctacgagctgagggagggcttcacctgaggcagtcagaagtgctaagagaagatttatgtggtaagggagagggaatctttccaacaatagctattaattgactttcattttgtagaagaatattgtattaagtgtttggagataggaaaagtatggcatgctctcaggatgtttataatttacttggggagataaggcacatgattgaaaagctagtaaaatacaagacaatagaatatccactctccggaataatattcagccattaacatggatgaattggatccgtatgtactcagacttgtgcaggaaaaggtcagtagcagaacaagacaccatctatgtaaaaattaaagcaaagcacacagatgtgtgtggacatatatgtgtatgcatgtgaacatatctgtgtatgcctgtgaacatatgtgtgtatgcacacggctgaagggggactggaggaaagcacgtggaaaaagagccagaggttcctcctggggagggaagtgagactggggaggacagagaagggcacctttcatatttttaccacacatacttttgtattgaatacattatttagaacaagaaagtctttctatatttcttatgtaaaaaaggaaaagaatgaaaaacatagcaacaaagcaagtacatgattgatgccaaggggtaaccctaaaggtaaaaatggtggcgtagtctgcccatcacctcacaaactctgctgccgctcctcttcctccttgtttacagaatcccatttttgctcaggaatctacctgcctgtgtctcacgagatatctggaaaaacataaaatcatggtggtcccatcccatcccatccctctgcagtgatttgtggcacttggtcatgtgatgccatcagggccaatgagattggaggaactgtccagggggctgctgagtaaagcttctttgctcttaaaaagaagaacaaagaagccaaaggaccactttttccttcaacaggatagcaccgtttctggatgtgatgactggcaatgcggcagccatttgagccttagggagctatcctggggaccaagccaaactctgaggatgttggtagaaagatggaaaagcctgaatccttgaagatattgttgagccactgaatcaacctaccctggagctgtcctagctcaggacttcagctccagtgacagaacacatttttctttttgttaaagccagctgaggtggggatatctattaccttccaactcacatgccagtcacaggaagccctgtttgtgaggcttcaagccccttgggtgcatttgaggggaagtttgagtcctcagggacatgccctctggggacaagaatgagaaggggtcataagccctctgtggctggggaggcagagaagtcatcctgagctagggtcactctttgccctggcacctcagtgggtgagaggaactgccagggtgaggtagggagatatatttaatacaagcagcccctcagtctggcccctgggataattgatacgagttctttctttctttcttttttaaaattgaaacagggtctaactttttcgctcaggctggggtgcagtggcacgacctccgctcgctgcagccttgacctcccgggctcaagcaatcgtcccatctcagcctccccaagtacctgggaccacaggttcacaccaccatgcctagcttatttttatttatttattatttattgatttatatttttttgtagagacagggtttctcacgttgcccaggctggtctcaaactcctgggctcaagtgatcctcctgcctcagcctcccaaagtgctgtgattacaggtatgagccactgcacccagtctacaagttcttaacagaatcagaaggtgtagctgggagacaaaagacccatcacagcttcgtgatatttggagggaagttttcttccttcagagcagaaaggatcactgctgtcatgggggaagaatattagcagcctcatgggagctggagtgaggctggagttgggacagtggccagccttacagagccatgggtaggttgcaagggctaggcaagcagagccccatggccgtgctgtggtggggaagaggcaggcagggggaaagcccactgcaggtatttccacagtgcgccagaagcaatgatggtttcaattggttggtagatgagtctccctgaattaaactccactcatcccaaactggtattgatttaaaatatcttaaactgggataatctcttgcagtatgttggagctgtgcacccgaagagagaaggggaaataaagtcttatcgtgagagaaagtgtgtgtgtgtgtgtgtgtgtgtgtgtgtgtgtgtgtgtagagagacaggagggagagaagaggaggacatgggaagagaggagaggagaagggggagaaggggagaatgagtcctcatttaacctggtcctgaggagggggtggctggtttctgcactgagatataggtgtttccttctcttgccttgcctccagcttgaaatcaaccacttccctcatttccttggaatgaagtcaaggaagacttgcttactcttacagtgcaaaacccagccccgggtcttcccactgttatctactgaaccctaaggtcactcagagcgacttgaaagtgtttcaggggccataaatgctcaactcaaatctcatttaaaaattttcccactttatacctgttaggatagcctgtatcaaaaaccaaaacccttgaaaacagcaagtgttggtgactgtgtggagaaattgaaacgcttttgcactattggggatgtaagatggtgcaccgactatggaaacagtagggaggttcttccaaaaatttagtacagaactattacatggcccagcaattccgctgctggatacatgcccaaaagagtgaacgcagagactcaaacagtctttgtaccccagtgctcatagcggcattattcacagtagccaaaaggttgaaacaactcaatgtccatcgatgggtgaatggataaatcaaatatgatgtatccatatcatgggacatgattcagccttaaaaaagtaatgaagtggccgggcctggtggctcacacctgtaatcccagcactttgggagcctgaggtgggtagatcacctgaggtcaggagttggagaccatcctggccaacctggtgaaaccctgtctctactaaaaatacaaaaatgatctgggcatggtggtgggcgcctgtaatcccagctacttaggaggctgaggcaggagaatcacttaaatctgggaggtggaggttgtagtgagccgagatcacaccattgcactccagcctgggtgacagagcaagtctccatctcaaaaaaaaaaaaaaaaatttctacttacaaaactgtagtaagaacaggacactcgggtactaaaaatacacacacggcccacctgtgtgctaagctgtgtttcccttttatcttctctttttttttttttttgagacagagtctcactctgtcacccaggctggagtgcattggcacgatcttggctcactgcaacctccgcctcccgggttcaagtgattctcctgtctcagccttctgagtagctgggattacaggtgtgcaccaccatgccaggctaatttttgtattttttagtagagacggggtttcaccatgttggccaggctggtctcgaactcctgacctcaggtgatccccctgcctcggcctcccaaagtgctgggattacaggtgtgagccactgggcccggccgttttcccttctctttgtgctcacctgggaatcaaagttctcccagcattttcaccagggagtttgcaattattgcaactataccagtggctaggaagtttgtatctcttgtatggatctattaaaaattcagacttgattttctccacttacataaagttgcgggaatacagctataacatgcccttatcacagccaaaagagccagttgtggataaacagcttgagacatgctgatattatctttgtcatttattgtaaagttttgatgcttcttgcctgacttttgttatgaataagaatacaagcgaccgttagatattgtccatggttctgcttcaaaacagaaacttccctctcgttctcctctctcaagcatctggatcagtttaagtaaagagcatcttgacacagccatctggaacttcctctcaatttctgtattcatcaaaaggtacaagtattataaatctgaacttgtgaaataaaattttaccaacaaagtactacatttgtttcagacattgaggtttccatcagatttgaattgcaaaaagattctgctgaaaacaaaaagtttgaaaagcactgtatttgcgcaattcccagtttggttcagttaaatgaatgctccttgaagattttgttcaattcttagctggacacacagtacattggtgagcgataagacataggaaagttaaattctgattgtccttgagctaagaatggttttacattttattttactttattttattttgcctttttgagatggagtctcactctgtcacccaggctggcttgcagtggtggaatctcagctcaccgcaacctccgcttcccgggttcaagcgattctcctgcctcgcctctgaagtagctggaattacaggcgtgccccaccacgcctggctaattttagtatttttagtagagacggggtttcgccaagttggccaggctggtctcgaactcctgacctcaagtgatccacccacctcagcctcccaaagttctgggattacaggcatgagccaccacgcctggcctggtctttacattttaaatggttaaaaaaaattaaaagaagaatatctgatgatgtgaaaattatatgaaattcaaatttcagtgtccattatataaagttttgttggaacacagccacattcgtttgtgtactctctctagctgttttcatcctaccactatagtgctgagtagttctaacaaaggccatagagtcccaaagcctaaaacatttattgtctggccctttacagtaaaagtttgccaacccttgcattagacaatgaccatatccatgtgaagtctgaacatcaaaacctgagaagttcaccttcttgatgctgccaatcttttggcaacattactgcagagttagacagactacatcagtggttctccagtctgggcaaacccagctcccaagagggtgtagagaaacgtgtgggcacagcttttgttgcaatgacaagactcgccatgcatatttagtaggcagggactaaaaatgttaaatttcaggcaatgttggatacagtcctgcacaatagagctcaaggtgtaccctgagaaacagggatccagagaattgctgtgattaattttacagggcaacttggctaggccatggtgctcagatatgtggtaagctgttattttggatgttttcatgagggtttttgggaggagatcaacatttaaatcagccaagttgaagtaaagcagatggcgctccctaatgtgggtggggctcacccaatcagttgaaggcaggaatagaacaacttctgacctctttgagcaagaaagacttctgcctgcagatggcctttgggcgtcaattgcaactcttccctgagcctctagactgttgcctaccccatcagatttgggactcactatggctccacaattacatgtcaattccgtaaaataaatctctctccacttacatacgtacacacacacacacacacacacacacacacacacgacctgttggttttgttactggggagaactctgactaatataattatcccaaagtttcagtttctggtctgaaagtgatcttcagtccacttattcctgtgctttgcaaattctacctctttttcaaatttcaaaattcagaacatttcaaaaataagttgacattgcaaatttcatctcatcaaatgctaaaaaaagttcatacttctggccgggcgtggtggctcatgcctgtaatcccagcattttgggaggctgaggcgggtggatcacctgaggtcaggagtttaagaccagcctgtccaacatggtgaaaccccatctctacaaaaatacaaaaattagccaggcatgatggcaggtgcctgtaatcccagctactcagaaggctgaggtggggagtcccttgaatctgggaggcggcggttgtagtgagccaagatcatgccactgaactccagcctgggtgacagagcaagactctgtctcaaacaaacaaacaaacaaacaacaacaacaaaatttacacttctgcatataggactctaattcaataaatgtggtgtttaattgaacaaatgtgtattgaactccagtgacccatttggaagatgctattggggagtgatataaagacaagatatagtctctgtcccaatttacccagaacagagaaagggcgactatcaggcacacaattaatgggaataccagggcatttctgagaggccgtattacagaggtacaaatcaggacctgtgggagtccttctcacaggagatcataactccaactaatgcaacctccccgctagtaaaacctatttttctttttccttctgaactatttctctcccagttattatcagtgaaaagccagaagcttctctggtttctcacccatgtccagagacagacaagccgtgggttcagaggctggtttttcacatcctccacttcacaccacgaggacctcacccactgcagctgcagaacaggaaggggtcatctacattggttacacgccccatttttagctggatgtagctaattattttctgtttaagactcttgtctttttaatcatacgaaggaactgcattattacgctctcattgtaaggatatgaaccatatggtagtgcagaaaataaaatgtgaaaatctgttctatctgttctcatttcctcatctcattcattactgcaacaaaaaccaattgtcctcactttgggaggccgaagtgggtggatcgcttgaggttaggagaccagactggccaacatggtgaaaccctgtctctactaaaaatacaaaaaattagccagacgtggtggctcttgcctgtaatcccagcacttgggaggctgaggcgggtggatcacctgaggtcaggagtttgagaacagcctggccaacagacgaaacctcatctctactaaaaatacaaaaattagcccggtgtggtggcacatgcctgtagtcccagctacttgggaggctgaggcaggagaatcttttgaacccggcaggtggaggttgcagtgagctgagatcgcgccactgcactccggcctgggcaacagagtgagaccctgtctaaaaaacaacaacaacaacaacaacaaaaccccaaaaacaaaaaaacccacaacctattgtccagtcaagtctttcttgctaccagagcaggggacatgccactgatgagagcgtcttctctgttccttccaaacactcagcccagcattcagatcattgctcacccagtgcagagtcacggtgccagggtatggagtacagatgccagagccacagccatcagagacagtgtttttgttttctagggccctgcaacaaatgaccacgagctatgtggtttgtagcaatagtaatgtattctctcacagctctggagtctggaagtcccaaatcaagatgttggcagggctgtgctccctctgaggcctcctccagggaggatccttccttgcccctccctggcttctaaacttttctggtcctcctcagcctgtcgctgcatctttctaatctctgcctctgccttcacatggccgtcttccctctgtgggtctgtgtgtccaaatttccctcttctcataaggacactgaccagtggattggggtctacactcctccagtgtgacctcatcttaacttgattacatctgcaaagacctttttctcagggaagctgatatggtttggctgtgtccccacccaaatctcatcttgaattgtagctcccataattcccatgtgttgtgggagggactcagtgggagataattgaatcatgggggtggtttccctcatactgttctcgtggtagtaaataagtctcaaaagatctgatggttttataagggggaacccctttcacttggttctcattctgtctcttgcctgccaccatggaagatgtgcctttcaccttctgccatgattgtgaggcctcccagccatgtggaactgtgagtccattaaacctctttttctttataaattacccagtcttgggtatgtgtttatcagcagcgtgaaaatggactaatacagaagctcacattcacacacaagggagttatgacttgaatagatcctctgaggggacacaattcaagtcacaacagatggagactccatacttctaagcaatccaccaggagccacaatggccccaagcaaaagatcatctctctcgaaggccagtcctgcttgactatggcacctgggcagataatgaaaacactaacccccttcaacgctccccatggactgggctcactgatctgcagaatgacccccgtggggacctagtccaaggtaacgtgctgcagcccaagcaactgcttgcttcaatttgcaagctgtgcagagcagacagcccaaaatggcagtggcttggggaaaagccagacgttcttgaaaagctgtcgtttcagaaagaaagaaaaaaaaatcacttattttttggataggcattgagtatcaaagatttaaaaatttggctctgaccacaatatatctgaaagtagaggtcattccgtaaagatcagcctcttcctaaatcaccaggctttccaaccagctcctggcagggtccgagggtcccgtcaaagtggccagtggactgccccaagggaagcatgaggaaagcacgtgaccccttctggtaacttggagaggagtggcaatggacagagagtaaagctagggcatgaatggggacattttataaaggcagcttccctcctctcctgggctcactggtacacaggagaggagagttggtggcttgctgaatagccattgagttaagaaatatagcttcagacataccatcttgtaactggagccatccaaacctctacttctgaatgttcccatggcaaaaacacagattttcacaacattccaggaaaatcctgaaattgagtcctgtagagggcttgggattgttttgccaaggaaataatattccacacattggaggtccatctgtgtgggcagatgtctgtcttgggaatgacagagtgaggccccaagctggtggtcactgctgggagtaggggccgggacatagactggagaaggcaaatggtaccacctgatgcagagataacattggcctggggtccttgtgtcagctgatggggacggaggtcagcaatagaaagaggactcaggaatgcatctatccttcctgttccctgtcccttcactctcaaggaaaatggcagcatcgtcacgattccccaaatgaaaatcacattggaaaatatctagtgttttatacaagaaggccagaggctgatatcatgaccttaggttttagaattttctatcagcagcaacatgtcagctaaaaaattccctatcaagttattacctgaagttttttatgccttaactttaaaaataaaggtctgcaactccaagcaaaaatcttggactcctctttatgaatcaaactgattcccaaactgagatcatagcccactccctggcccctgtgcttattataaaacccatcttcttttcacgtccaatataatcaaggcagccacaccccacacgcagcactccagccttactttccccaaatccaggccccacttcatgtgaaaatgcatattattacccctgtgggctcagagcctgttttgaaataaagcaaataagaaccacaggggagtgactcaagtccaaattgtgtgtcctgacttggcgcaaatgttcttccttgtccttgcttattaactttgggagacactgagcattccccaggatgcgctgggggtttgcacacaatcctgcccaaagctgggcaaagcctgcgtgcccagcagccaggaattccctcccctccatccccatttggggcctgttcagccgccctcgttttcatgaaccccacacaacccactgcgtttggaggaccctgtgatatatggcgccttccagagaacaggatgcagatgcgcgggggaggtaaccggagaacagcgcaagaagatgcggctgtccccggagcccaacacataaattacaaaaacaatttcgaattcaagggcaagcattgccattcctctcttttccaaactttggcttttttgtgctgaaggtaagtttgagaggagtgtagattttatcccaagatgacttcttcccattccattttaattatccgctgggtctcggtgactaagtcatgagtagggaggacccttgtcttcaatgccctgccattggccagccaagatccagtgttcactgtagccatggtcttttctgggagcagaggaatttgttcaggggaaaggggagaagaggtggcccacacggaggcaggcagaacttcatgtcactgcggaggctgaacccaagaccaaccaggcacttggcagtgaccacccctccccacctccccagggacactcactgtcctggctggacccttcctgatccccccagtgtcagggagcaagcttgattgtctgcgcccaggagtcccagacttgagggctacatttctcccgattgcctttgtgcagagcacacagatggcttcaaataacaggctggtttcatgcacctgtgctctggctgtcccaggttttagaaaggactgatccatctcctcttgaaacttccatctgaatacacatcaatagggtgtatatgtgtgatgaaagaaacactcttcagctacatgattagatgatctgtgttcccccaaacttttgcaaacaagagactgcactctggacttaaactttcttttcaataaaagcaatctaggaagtttcccagtttaggtagaaagtggattaggccaggtgcagtggctcatgcctgtaatcacagcactttgggaggcggaggtgggtggaccacttgaagccaggagtttgagaccaacctggtcgacatggcaaaaccccattcctactaaaaatacaaaaaattagccatgcgtggtggtgtgcacttgtaaccccagctactcgggaggctaaggcaggagaatcgcttggacccgggaggtggaggttgcagtgagccgagacttttccactgcactccagcctgggtgacagagtgagactccatctaaaaaaaaaaaaaaaagaaagaaagagagaaagagagaaagaaagaaagaaagaaagaaagaaagaaagaaagaaagaaagaaagaaagaaagaaagtggattcggcaccatccctaataacaggtgggaagggactgcccttactgcccactccgagatgctccagccctgccggctcctggagtgtgacctgagggacacaaagcagcactcttaccaccctgaatgccagttccaaacactgaatggggacacaggtgacctcaacagcaggacctgactgctctctccaagcacaaggaaacttgttttttagatctatacccatcagcagtgtgagctgcagggaaaatgcatctggctaagatttttttttttttttaatgagacggggtctcacttgctctgtcgcccaggctggagtgcagtggcatgatcacaactcactgcagagccttgacctcccgggctccagcgagcctcctgctcagcctcccaagtagctggggtcacacgtgtgtgccgccatgcctggctcatttattttaattttttaaagagacagggtctccctatgttacccaggctggtcacaaactccagggctcaagagatcctcctgtcttggactcccaaagtgcagggataacaggcatgagccacggcgcctggcctgcctcagactttaacctgcacaagggaatggggaactcagttatggcaagaaatgagacagataccgaccgtatgccactgacagaaaattctaaaacccaaagtcatgatatcaagtgaggcagataccgaccctgagctccacgtgaccgtgctgtgggcctagaaatgagggggatggggagtgtggctgccacatgacaggcaggatcgtatacctacagcctcctggacctgggcccagtagagcaagtgctgccacctgatattccaatgtcacattcagagacagccactggccacttcccagcagggctggtgggcacttgtgagaatgggaaactggacccatgtggaggtgtcctgcctggtatgctctgccgggctgtgactcacggagggacgggccctgcacccaggtgacatcagagcccagggtgccatcttttctcagctccttctagcccatgttgtggatgcaaggcatgggtgccaggtactttccccttccacccacccttggctgctgggccaccttgactgcccttggagttctgggccctcaagagccttctccatcacctgcttctcatgggcgctgctccgacacccaccccaggtgctctgtggaatgtgccagtcagggctccctcacggagggtgaacaccaaggcccacctcagcaagcatggccaaaccactcaacaagcagccagacactgatgtcctacccagcccagccctgtgacctcgagagaaggataagacggacaccctgacatcaagaatgcgtggtctcgtgtgcagcccaacgcaagtgcacagaatgagggggtgtcaggctgatgacatgcactaggggactctggggcaggagggatcagtgagcttcaaggagaaggtgaacgccatgctgagtcttgaaggatgaagaggatggaaggtgagtttcaagtcaaagctaaatgaaaaaaaaaagaaataaagacttgaagctggcagcgaggagaaagaaaaggttctgaggccagggtaatagggcagtggtcagagaggggatgatgatgggggttggaggatggcaaggagcccctcagccacaacaggggacaccaaagatgacagaagagccggcatgaggtcaaagggaggccagacaaaggaacttttggaaacctggcagaggtgtgaatggtgacttccaagctggtgagcagcaggatggaaagggcgggtgatgggtgtggcagccacatgtgtggtgtgctgggcagatgccctcatggtgaagccgaggctctgccattgaccacgaggcaccaccaaccacactctgactcctccagcgatacagctgccctctcatcaggaacggtaccaaggagccttggtaccatcaactatctgctgccaaccggttacatggagtctttaaaactggggctgggttttaaagacttgagaggctgagcgggaggattgcttggaacgtatggtccctgcccacaaaaagcctggcccctggaccagagggaagcggcacgatgaaggtatgagagtgtttctgttggcgggtccagcctctgcgctctgactttctccagctcagagatatcccttcacccaggttcctacagagccccatgctctttccttatctgagaaccacagattggaatccacaaggagtctagctgaagatcatttagtccagagggtgcaaaacttttcctggaaagggtcagacggtaaatattttcagtgttgccggccacagtgtctctgttgcacctgctcgactctgctattgtagtcccaaagcagccatagacaatacataagtgaaatgggcatggctgtgttccaataaaactttatttgcaaaaacaggcagcagggcaggtttggcccaccagtcatagatctagcgctcaacactcccatcctacagatgctgaagtgtagcctcaggaagatggaactgacttgaccaaggctgcatggctcccaggaccagaccagaactcagaacatctgctcctcaatcttcaaatctctttttaaatgctattcaaccagctgcttcctcctggcaaagtggggtcctggaaaagaccatgaatcttattgactcaagagatcggaaagtccagtagaacctgctgggatgtttgtgttttcaatggagtagagaaaacaaaaacagatgaaggacttcagcaatttttaaaaatggagtgttcattcaaataaactttaaatcccaccaggcaaccacgggcacttcacactcctgaggtaggcccagcaatacctgagacaaatctcacccctatttaattatcattaatcttccctccaggcttttccatacctgctaaatagctcaatccatctcattactgaaggcagctgctaggtatggttgtgagaaatctcattagcacaaatgtacttctgtatggtgggcctgataggcccacctcccgagacggggatgttgaatggcaaaatctcagctctgaggaccatcaaagcactgggttccccaaagttttggccacactcagtagtaagagccttttattattgtcattttcaactacagagatcatgccccccaaataagaagaaagcaaacaccttaaaagggcaaacttgaagattcacaataaataggtaacacgtgaggggtccaacactgtgaagctcaactgttcctcctctcggacgtgataatttcacatgttcagaccaccctgtcagcatgtcagatttaaaatattacacgtagaataatgaaaaattgccaacttctcaccaccgtcttttgattaatgaggagttccttagagattgattggtttatttgattttgttgccgggagtgactgatggctattttaaaaaatacttagcttagcgctaccctccatgagataattttcatatgccttgtgtagctgcgtccagaataattggactttattgccttccttccatgcatgaactgaagttccctggagaagcaaaacagcttcagactttgttgctttaatatttccatgtagatcagctgctgtgttcatggagatgcttccaccagatggccagcccgccttgaagtgacatttcccatttcccgtcgattactcaccaatggaaaataatgtgatacgaatccctcatttggggtaatatgtggccatatccttgttgtacctgcactaaagataaatcatgcaataatttctcaactgtccagggagaaaataggagaaacaacaggtcaccagtgtttggcaggaaaagggaatcgttattggtaaggcattcactgggacattgaaatctaatgtcctaatttctttcttttttttttcttgttgcttgttcttctgtatctcagggggaagaaacttattttggttgtttaaaacatttaagctctggtttttaggaagaatcctggttttggtcaagtccctagatgtctcttcccaaaagcacccattttgatgctgaggcgaggacaaaagtattagttttcaaaaagcccaactttatctcctgaacagactcaaatgattaattctcaaagtcattgtcaaattttacttttaaaaatcttagtaatttctcttcaatatttggtacaaagctgtcggttactctcagatcatccttgtttttcaacttctctgtttgattccagcaaattcttttagctggtcactcttgaattactgttaaagataagtaagtaaaaatgaaaatattattaataaggtatgaataattatcactaacagtttttcagcccttaacatgtgccaggcagtgtggttagggtattccatgctttaagccatttattgtcaccgcagttctgagaggccaggaatattatcatcatcttccagatgtggaaagtgagacagtccacgtcctacagccagagcaggattcgaacccacagtcctgattccaagctgttcacctctgttcactggggaagccaagtgttaggaaactcttctttctggaatgttccattttttcccttctcagagagaagtcagccctgttatttcccagtttctgctcttcctaccaggcttcaggtctctgcccactgtgtcctcacaggaaggcagcaataaggaactgggttagggtctcttcccccgtccacagatattggggtatgtgggtccctgagtcttcggtccatgcaaggggcatctgtccctctcctgcagacagtgatgcaccctgggccgcaggctggctgctcgcaagttgcttttcctcagtgaaagaatctgcttgttggaggcaccagaaggttcttgaagctgcagaaaattctacaagtggtggaaggttctggaaacagcttcctccctcctcctctcccccttctccaccacaggcagcatctgctgtagtgtgagccgcaaccctgcctggccctccaccaagcctgaggaggacgcgagctcggctgcggctgacagcattcagcagcagaactccaagcaagggggtcacctgcccaggagactacccccttagtaactcaagcttttatgcactcattggtattcatccagatggctgttttggctagaaagaaacacttcttcctcactagaattacaaataatttgagcagaaaactacaggcaagacatgttaattatgtttgaaaggatgtatcttttggtacaaagggttttcttaatctaaaaatgctttccccgatctcaacttatatctaatggtagtttttagcacacagagtacgtagcttattttgtttagtcctttcatacccacctcctgtgcaggtaaaaaaaaccacatcttttttttttgagagggtgtcttgctctgtctgtcgcccaggctagagtgcagtggcaccatcttgactcactgcaacctccacctcccgagttcaagcgattctcctgcctcagcctctcgagtagctgggattacaggcacccaccactacgcacagctaatttttgtattttagtaaagacagggtttcaccaggctggcctcaaactcctgacctcaagtgatctgccagaggcctcccaaagtgctgggattacaggtgtgagccacccacacctggccaaaaaacccatagattaatatgtgtcctttgaatcagtctcttccttagtaacttgcttcaggatccaaggagtgaaccactatggaaatttttctgtaataatttcccttaatccttatttagatttgtaagtctaaacacttaccattatctgacacatgaagtatgagctatggacgttgtctcataatcttttccttattccctatttatatttatttgttagtctaaaaattaattgttacctgacatataaaataaatgtcatgaaagcaactgttttatgcagaacaacgtagtgctgtgtagtttttatattatgctaatatcggagctagcactcctgcccccagcctccaatcctgctcatcgaccccgaataacagacacctgagcgggcacctgctgggggatggactttgttaggacgattagaaaggagcgtttccatgatttgcttatgcttcacccttcctttcagttaaagattaagtctttgcatcggatttcagttccgaggcgggccgggaagggatgtggatattttctttattttttaaaaaaacaaacccttgtagatagagttggtttatttttaacaagggtagaagcattgtgggaagctgtttttcagatttcatttcagccacagaccgtgctgtacaaatgaagacacagcctggattctccctaatgaaaagagtgtgtcggggatggggacagtggcggggggtgggtgggctctgagggagcagctccccctgcacagagatccgggccacatgcaggtctgcagtgactctgccttctctctagcctcaccttcatgcagcacttgccttaaaccagctcacatgccccacctcaggcaggtcaaccagcttttactgaacacctgctatgtgcagggcagaccaataggcataaaggaggtctctgtctttctagagatagtctggtagatgagacagatgtggaaactaataaatctaacaaagggcagaggccatgtgataacaaagacagtaagtgaaacccaagccacaacagatacaagcataggttgaggggatcatggagggagtgaccgattcccaccaaaggagaggggcagagagggctttggagaataaacaggtagcaaaagggagatatttcaaaaagtgggaggaggttgtgtttcagatgtacccgggggagtttgggagggagatgggaaatgaggagcaaaccttcaaacagccccccaaaaagaaagaaggctctaagacagcctgttgagtgaaacaacaagatgcaaaacagattgtattaaaacataagtttgggaaacaaattatgttcaataaagcaacatttaaaataatgttaaccgaggtgaagtggctcacgcctgtaatcccagcacttcgggaagcccagatgggcagatcacttgaggtcaggagttcgagatcagcctggccaacatggtgaaaccctgtctctactaaaaaatacaaaaatcagccatgggtggtggcacctgtaatcccagctactcaggaggccgaggcaggagaatactttgaaccccggaggtggaggttgcggtgagccgagatcatgccactgcactccagcctgggtgaagagtgagaccctgtcttgaaaaaaaattaataatgttatagaaattttagggaaataaatatatatatatttgctataaatgtttttttttttttgagacagtctcactctgtcacccaagctgcagtgcagtggcaccatcttggcttcctgaagcctccacctcctgggttccagcctcccaggtagctgggattacaggcacgcaccaccacgctcaaatttttgtatttttagtacagacagggtttcaccctgttggccaggctggtctcgaactcctgacctcaggtgatccacacgcctcagcctcccagagtactaagattacaggcatgagccactgcgcctggcctataaatgtatgtttaaaaggcctctatatatcctcaatcaataacagcctctggggtgggacaggagggaatgtccctcctggtggaatggggcaggagtgtcagagtggacttcagtctttgtctgttttttttttttttttaactaaggaaaatatattcttcattatctatgtaattaaaatacgttttaaaatctaataaatcacctatttacttttcactataacgtagggcacttaaggctattatgttatgtccaatacatctaggtttgatacttcaaagtcaagcggattctggagaagccaaaatactgacccagaaagtctagattcgcctagtttaattcccttattttacaaatggggaaccgtgggtttctcacggtctttttgttgataggtgcaggaagatgtacgtgaaataattcatggaaaagtcacagtggccttgaagttctccagataactatgaaaaactacgttaagatgctatttttcaacaaaattcattttaccaacctcaaaacgtatttcctccgaagaggatacgcactgacaaacaacacccgagtgtggcatgctagcaggagcactaggctgggagtcaagagacttaaattccacccggaagccaccacatgaccttggcatgagcccgtcaccaggctcctcagcgtcctcatcgcagcaccagggatttcccaagccctccggaaatactgtaacttgacaacaatggagaaagactttcacccatgcggttggaatgctagccttaaaatatatacaattgttacatgtcaataaaaataaataaataaatgtttaaaaaaaaaaatgtccttccagggaacatcacacaccggggcctgttgtggggtggggggagtggggagggatagcattaggagatatacctaatgctaaatgacgagttaacgggtgcagcacaccaacatggcacatgtatagatacgtaacaaacctgcatgttgtgcacatgtaccctaaaacttaaagtataataataataaaattaaaaaaaaagtccttccaacaggtttcaaaagtgaggttctaatttaagccttgcagggtctctaatgtgaagccagtttggtggggttgaacgccaaaaggataggaagggcttctctttcgagaatgcggggagaaagaaaaatcagtattttgactaaaagaaagtatttaagttacgatcagaaatatatttgtctagaaataaaaatgcattccccctgaccccccatccctttaaatagtcacagctggctctctggccatataaagttaccatgctgtcaaatgactcaacttacaacatctgcattggtgaccgacatcctgtatcatgggctatctaaccctttgagtcacgacacccctgtttgagtaaggtttattttactagcaccaagagactcctgcgtttaacatctgtggtgctcctcctgaaattcctagccataaaacaagtaaattcagcgtggtctgaaattccagagcgtagccacgaactacacagaaaacacattcggtggggccggtcggtaatggagcagggcttagctcgggtggggctgcacatctggctgtgccttccctccgcaagtgtgggaagaggacctgggaatgccagggtccagccaggcagagagtggctggatggtctgcacgggcaggggatgctctggacacatggccaggagggtgctccccacagtgcacccttaggtgccaggttggtgacattgggtgtgaccaactgttaaccactaaactccatctgttaatgtcctctgtaggccaaatactccatgtgcctgaagatgcttccggcttacaattgtgaactcagtttctgtgtccagcatcgagagtttaaagtggggcgcgcccattctctggatgggcacagagctgttaaaatggtgattacgtagacattgtaccacgtgggaaaatattgatgatgagaccacattagagaaaatgagcaaacagaatgcagggtggcaacgtcaccatggtaataaattggtaagacctcctggaacactatgcagccataaaaaagagccagatcatgtcctttgtaggaacgtgggtggagctggaggccattatctttagcaaactaatgcaggaacagaaaaccagaaactgcatgttctcacttataagtgggagctaaatgatgagaacacatggacacatagaggggaaccacacacactggggcctacctgggggtgaagggtgggaggagggagaggatcaggaaaaataactaatgtgtactaggcttaatacctgggtgatgaaataatctatacaataaacctccacggcacaagtttacctatataaccgacctgcacatgtacccctgaacttaaaataaaacttaaataaattggtaagatctgacgtgcctgtgcagctgaggactagaactgaacacagaaaaattgcaatagcttagttcactggagtgaagtggctttaaatttttttttttctttttgagacagagtttcactcttgttgcccaggctggagggcaatggcgcgatctcagctcactgcaaactccgcctcccgggttcaagcgattctcctgcctcagcctcccgagtagctgggattacaaaaaaattttttcatgctattcatgaaaattaataatttcaaagacataatcccagctttttaggggagtctccggcaaggcatgggggtggcatctgcatgcaacacacggttgacaggaaaaagggatgatggaagcccaggacgatccccccgtgggaaccagagcaaggtcgtgaacttcaaagctctttgacaagtacaggatgataaaaacatatgggtttaggacaactccccgtcacatcttctgtgtggccgatgcctggcaatccttcaagtctctcttccatatcaacatgccttgtgtgtggggtgagcgggcaataaggagaggctggctgacaatcaccatggcaccatcccatcaagatgacgcacagactcctcagcgaggcgcacacctggccttatgtgccagacattctactccaggggcaagcagcctctaaattatttgtcactgataccctgagtgtcccattttcacgatgccacccagctctgggttcaatcctgctcttgctcattcccctgggcaaggtgtcagtctcaggctgtgtaaagaggctgtgtccccgccccttatatttaaatattgagtgggttgcatctttcccagccataccaagaggaaatgcaaccatctccctccctgaggccagcgtaatctaaccatcacaagccaggaagggttgtggcaagccattgatcttattgtgtaattatggctagggaagtgtgaatgataatggatgaaaaggagaggtggaaacaacagactttgcctgaaaatgggatgagttaaattacagtgcattgattcaatagaaaatcatttatccatttttaaaaatgctttgtgggctgggtgtggtggctcatgcctgtaatcccagccctttgggaggctgagggggcggatcacctgaggtcaggagtttgagaccagtctggacaacatggcgaaacgctgtctctactaaaaatacaaaaattagctgggggtggtggcaggtgcctatagtcccatctacttgggaggctgaggcacgagaatcacttgaacctgggaggtggaggttgtggtgggctgaaattgcaccactgcactccagcctaggtgacagagtgagactctctcaaaaataaatacataaataaataaaagtaaaaaataaaatacaaataaaaatgatttataaagaccacatggtaatggaaaaaagcatgagctataaaattaagtgagaaaaagtactgtacaaaatggtatgtgaattataactataaaaatacatttaaagaccacaaaagaatacaaatatataggtatgcatacacatacacatctaaatgacatgtatagtcatgttttattctagaaaggagatgaacaggtgcatttcctttaatgcagaagggagtccacagagagtggctctgagcaggtgacttagttggtttcaggagtggtgagatcatggggaattttttctctgtggccaacaatttctgtaacgtcatgtataagcaactgaaaaattattatctcaaagcacatgaattttgtatgttttggcagcactttctgcagttcaaatggccatatgaaacccttcgggttagccacaggtacaccttagagcaaacccaccccatgggactgacaggaggcaaagtggcatgaaaggacaacacggtgctcccccaccctcggaaagtacaggaatccatcctcactgcaacaccatctgtaaacgttctccaggggaggagaacgcagccctgctgtgctgttcagcacttaagcagactgaaaaagcaattatcataaaatgcaagttcagctgcagcccagctctgtggggaggttgttggatgaggagctgtctgtctgggacagcccctgactcaggcttagcttcatccttgaggtccagccttgcacctgctctgtttcctcatctggggtccagctgacatctgcctgtacctgaggacctgcccagggaaggccgagggagacagtaggggactgaggacaagagtgggagccaggcagcccacccatcctcagttctccctcgtgttagatgcagaaatcaagttacctcgactgaactcattttaaaaatgactttactccattctgtgtcaatgttgcattcttggctttgaccttgtgtattaaagaagcagctcaatgaaaatgttccgacattacctgtgagctgtgaaagaggtggctgattattttgttggtatcatttgtctaaagctccatgggacaaattattttcataatcctagtgcaagtaaagatcatgtttcctaaaggtgatctttaaactattttttcattgacagtagaaagctgagagtgaaattttgcgtttagttatacgaacgacactaatgtgtttatagcacctctattcccctccttcctcccacccaccatccttctacatgttaagaaaatattttctctttttttcaacagactttctcttttattataaactgcctcaaattctttttaggagtagataagatgtcaataaacctgcatggcaacatatcttgaggaaattgcctattggcagagacacactttcttaccttcaacaaggtagtaacattgctcaactaaaaaaacctgggccaggcttggtggctcacacctgtaatcccagcactttgggaggccgaggcaggtggatcacctgaggctgggagttcaagaccaccctgaccaacatggagagacctcgtctctactaaaaatacaaaattagctgggtgtggtggcgcatgcctgtaatttcagctactcgtgaggctaaggcaggaggatcgcttgaacccgggaggtggaggttgcagtgagccggagatggcgccattgcactccagcctaggcaacaagagcaaaactccatctcaaacaaacaaacaaaaaacaaaaaacacacaaaaacaaatctgcagagagagagagagaaaaaaaaatccaggctgtggggttgtctataagacaactcagctaggcccttcagaaagtcagtcataacaaaaagtctgggagactgttctagattgaagttgataaaaagacgtaacaatgaacatactgatctttgattagatcctgctttattttttatttttttaaaaaagctataaaagatgttttggatgcaattgggaaaacgtgaatatgaactggatagtagatgacgctagagttaatttttttaaaaattaatgttatgaggtatgataatggtgtcgcagatacataggagaatgtccttggtagacatctaatgaaatatttatagtcaagtatcatgatcatttacaatttacaatttaccttcttttttctttgtttttcttttcttttctttttttttttgagacggagtctcgctctgtcacccaggctggagtgcaatggtgtgatcttggctcactgccacctccacttcctgggttcaagcaattcccctgcctcagcctcccaagtagctggcgttacaggtgcgtgcctccacgcctgactaatttttgtatttttagtaaagacggggtttcaccatgttggtcaagctggtctcgaactcctgacctagtgatctgcctgcttcagcctcccaaggtgctgggattactggcatgagccaccacactcagcctacaatttactttcaaatggttaagaaaaaatcaaaacaaaatgtgtgtgtgtgtgtgtgtgtgtgtgtacagagagagagagagaaaactgtatatgacaaaatataaacaatggttagagccagggagacagtctacaggtgttcattgtactatgcttctatctttgctgcctgtttgaaaattttcagtcagttggatggaggtctatgaaagtccaacacttatagatcaaccagaaatagatgaaatctgatggtaactcattttctggaacccctagtgtacccccaaacaactcaaatggttgagatcaatgttaatgggtttcagtcataaaacttagcaagaaaaaggaaaacaatcaccaccaccaccacagttttgctgctgtcactctgtgtaggacgggttgcagaactgcgtggcaagaagagacagcggatcacaaggtcaagagatcgagaccatcctggccaacatagtgaaaccccgtctctactaaaaatacaaaaattagctgggtgtggtggcacacacctttaatcccagctacaagggaggctgaggcaagagaatcgcttgaacccggaagatggaggttgcagtgagccgagatcgcaccactgcactccagctaggtgacagagcgagacatcgtctcaaaggaaaaaaagagagagaaaaaaaagaagagacagcatttcagaaggagtctctgcccagcgtccagcagcagtcggtaagagaagcccatgtatgagaatcaggatgctgcagtgctccctcaagtcacctccattgaaaaccattttttttccacagttggagtggccgattgctgcaggtatgacatctggccagtaccaagtcttcctaactcttcagagatcaccccaactcaggaatgggcagacataacggcatagggagacctgtacgagtcacctgacccccagcaccaggtcaaggctgcaggagtcccagtcgcgcccctgcccggcacacccacacacagagcttgcttctcaactaggcccggccagcgcagcttcctctgggcagggccctaaatgtggattcagagctggacagcatccgctgaccccactccagaatgatggctgggaagtctctgttgtaacccccgccaatttaagagatgccgagaatgagctttcagtcacatattcattcattttaaaaatgtttatggagaaacttctctgtgccaggctctgtgtcagacgggaatataagtttgtgaacaaatcagataagatccccacactcaaggtgtttaaggtctactgggagacatggcaatgaaataagcaaaaaatacgtgtgtggtgtgtgtgcagagtgagtgcgtgtggagtgtgtgtggagtgagtgtgtgtggagtgagtgtatgtgcggagtgagtgtgtgtggagtgagtgtgtgtggagtgtgtgtggagtgactgtggagtgtgtgtgtggaatgagtgtgtgtgcagagtgagtgtgtgtggagtgaatgtgtggggaatgtgtgtgtgtgcagagtgtgtggagtgagtgtatgcagagtgagtgtatgtggagtgtgtgtggagtgtgtgtggagtgagtgtgtgcagtttgtgtggagtgagtgtgtgtgtggagtgaatgtatgtggagtgtgtgtggagtgagtgtgtgcggagtgtgtgtgtagtgagtatgtgtgtagtgaatatgtgtggagtgagtgtgtgtgcagagtgagtgtacggtgttagtgtgtgtggagtgagtatgtgtgcggagtgagtatgtctgcagagtgtgtatgtggagtgagtgtgtgtgtgcagtatgtctgcagatgagtgtgtgcggagtatgtctgcagagtgagtgtgtgtgcagagtgagtgtgtgtgtgcagtatgtctgcagatgagcgtctgtgcagagggagtgtatgattggagtgtgtctgtggagtgtgtgtgtggagtgagtgtatgtgtagcatgtggagtatgtatgtgtgtagtatgtggtatatgtgtgtagtatgtgatgtatgtgtgtggtatgtgtatggtgtggtgtgtgtgtggtatgtggtatgtatgtgtgtggagtgagtgtgtgttgtgtggtgtggtccgtgtgtgaagtgagtgtgtgtggtgtgtggtgtgtgtgtgtttatacagtcatccctcagtattcacaggggattggctccaggacccctgaggattccaaaatccttggctgttcaagtccctgatattaaatggcgtagtgtttgcatgtggccaatgtacgtcctctcatacactgcaaatcatccctagatgacgtataatacccaacacaatgtaaagctatgtaaatagttgttatactgtgtttttatttgtattgttttttattgttgtgttattaatttttccaaatatttttgattcatgaatgtggaacctgcgggtatggagagccaactgtacatcacataggaacatatctaattaccagctgatttgttccagaaaagaaatcaatggggtgcagttgaatggtggccttaacctctcctactgatattgaacgctgggcagcatggccctctgaaatcccactcgttcctgccaggaccaggggggtttgaggagtgtctctttgagaaagtggctgtaggtcaagtgctgagagaggggagggagggactggggggcagggctccaggtggagacatcttgtgaggtacctaagagtggtgaattcagggtgtgaggagagggcagagaggccaacatcagccagaccttacaggtggtgataaatagttagatgtttattctaagggaagaggaggccacagaattgttgtaagcagtggatggacatgaggtgacttgggttttaaaaggccactatggtgactctgtagcaagctgattggaggtgggcaagagtagaaggtattttcacagtccaagtgagatatcagttccttaaacaaggacagtggctgtggagggggagaggagtggactgattccacatacactttgcaggtagaattgacaggctttgctaatgggttggatgttagagttgagaaaagaggagaaaccaaggataacttccaggtttctggtttaagccagtggtggtgccaattccagagagaggacttgatgtggacgggctggtggggagaacatggaagtcaacagtaagagttcttcatcttctgcaggatacctcctacctttccgtcagtcagtttatcaatcgggtacttgttgagggcttatcatgtattaagctctgtgcatttaccttgacatatttttaaagatgatttgaaatgacttctaataaaactcacaggtacaagaaaactactgaaaaggtgcataggtgaaagaacaagagccaagtaacaaaaggatgaaaagaatcatatctaagtcctaatcctaaaagagactgctgcaactacaagcaaaaaaccttaactctgagttccccaggaaccaaagcaaaaagggaaagttgagttttataaagccgattgtctaataaaaagaagcatgctggcttactcagagaaataaaatttcgcccttattttcaacttcgaaagcatttttcttactacctaccttctgtaagggccaatgatcaatatagtggaattgttatattgtcaataacaattttacacaaaatacaaaagatttctgtataaaacctaaaaaactggtgtcccaaatgcccggtagaatggactatcaagggcactggccaggggcacaggtctgtagcaagggaatactttggcttgtgtcttactgtcttaggttttaatagtgtctttgtgacgagtaccttgctacccactgacttaattacagtttcttttgtcttagaatgtaaatttcttttgttacccccccccaatcatgtgtgtgcatgtatgtgtgggtgtgtgtgaaccactggagttggctgtagactttcttttacttttgcagccagagtctccctctgtcgcccaggctggagtgcagtggtgtgatctccgctcactgcatcctttgcttcccaggttcaagggattctcctgcctcagcctcccaagtagctgtgattacaggcactcacgcaccaccaccatgtccggctaatttttgtatttttagtagagacggggtttcaccatcttggtcaggctggtcttgaactactgacctcatgatccgcccgcctcgacctcctaaagtgctgggattacaggcgtgagccaccgctcctggccggcaatagactttctaaaacatttaaataaacttcgcaccccttctcacgctgcccggaaaattctgacttccctcaccttgggagagcaaggctcatatagcagacgttgcagaccttgtttaggtcacacttaagataaaggaagatgcaaactcctttttttctgatcagctgatcccctgtgactgacggccggggagcccctatggcaccagtctgtaggctacagcctgagccagattccatgctaaaagtcccgaggctggcagtgaaagaaaccccccggggctggaaactcacccctcctgggcggctgcacaccagctcatggccgctctggggtctgtgagggcccggcgcccgttctccccagggagccgcgtgactctccttgatccggcctcccctcgagcgacaggcctcccagaggccccccagcagcccccgagcagtccccggagcgctgggggactctgcagcgcgcaggtgaccacgcagagacagccccagcgcgatgaataattgaggcgcagagtggaattacctctgtgggctccgagtccctcccgcagcccgcacctgcccctgcccctgtccctgcctctgccccaaggactactgctcttttcagaaatgacgccagtaccagcacgtgcaaaatgccttgcagccttgctgggaacacatttgcatactcagtttcaggtttaaatgcctgcgcataaaacaggattaaatagcacaacctggcgggggcaggggggagcacaagggtctcccttccacctggccggaggtgggtgaaaatcccagcagatttcaacaacccgcctcccaccctacaccgcaagtaggtgcgcggagggactcaactgctggggcaggggctgccctctggggtagagggacccccagtttccaaagtgagggctcagagagcacccaacttctccgttctctccttttttcattcatttttcctccaacagatatttattgaacacctactatgtgccagcactgtgaagggggacagtagggtctatagcagtgaacaaaaaatgtccctgctctttgagttgggggagacagacaattagaaaaagattcaaagaaataacatagttcccgtatgaagataagagcaacgaccagggagaggcaaacaaaagagagtgatagggaagtttctcaggatgttcaggagggcctttctgtcctgctgtgcttagattctgcctataacttaataagtatgttatcatttgatagtaatacttaccaaacacttctcatgttctgggcactataataagtgctttagcactttggctttacataatcgttgtaactacctaatgacatggatctctaattgtgcccattttacaaaagagtacaattgaggcaatgggtcctgaggccagtagctgaagaatggcggagctgcgacttgaacccaggcatctagttctaggaccccactctgaaatactgcactgtaatttacatatattcatttcccctcgtttccaaatgtgggacacggccaaaagcaagcaaatatgcataaggagcttctgacacgtaaacagccacccccatactgtggcatttctcctgttcttgcctacagttctagttgattcctaaagtgggagagagcgtgcatgatgatagggactgtttacttagcaaagaaactgagtcagctcaggatccccaaggctgcagccagggaagcctgtgtcatggattcaaccgtctgtgctgagccgcacctgcactggctgaattgctagcagccgggtttcaatttggggacccaatgggtgacacccaggaacccagaagccacaccagcccttggctccctccaacccaggtttccattaccatggtgctgcctgccagcttggcaggatcacactacaccttgggcaggtccttgccctgggccccctctgctgccatccatccctctccctgaaaaaggtggtgggaaggacaatggccttttcttggctgaggagtgccagggaaccaagcctctcagtacagaaggagggagcagccgaggctgtctgacatccagaccccatcacagggtaggcctgctggattgtgggtgtcttacatttgctcatcctccaagactagaacaaagttctcccaggcctcagacagtcatccctgcctgcagctattgactgtttgcataggaggggatggagttgggatttaggaaggagaggcaaatttgaggctggggagaatttgaattttcctgtgcactaaccacaggcatcccctcctccagagcacactcactctcagacgcccagggagctaagcaaaatttctctgtattttatccaaatatgccgtggactttgaaatgaactctttacacctccttcctgctgacccgactgcaaatcagcttttgatgggattggacagcttggagagatgggcagcgatcacgctgaaatatgatgacaggggcaagactgcaaggacatccgcgaagtaagacatgtgcacagagcaaccatgtgaaaacaattaggacgacaaatttactaattgctgaaagtaacttaataacaaaaccacaatgctctctgttattaatcctggctactgcagcgggtgccaattgaagtttgcttgcaggagggattgtaagtatcaggccagtgccctagcatttgtggatactaagtgaaaagaggttgcatctctgttggtaactgaaaaataaaccgctgttcagcctcctaccaatgcaggtggccatagggatttgaggcatttctgaagcccatggagagagggaggcagggctctcttgcctttctgtgactctctcttttttgcattctccacttaaaccagagcaacgggcattactcagattttggagggttaagaattgatttttaagaaacacaaattcaaatgcaatattcttaaagcgttttaaggtggagtgggtagaaatgaggtagcaagggactccattcttgggttgggtgaggagccttcaaaagttctctgagttcccaagtctttcacaggctgcttgctacacataatccttcacagaaattaggtatcagtgcctaggcatcgggagtgaatgcagtatttctggaggcaagggagtcccttagccctccagaagatcaaagacaaccatcaaatgtgtcaccttcaataagtcatgggatgcaaaggaccataatttcccttactagaggggctctttgtgcctatatttctcttaagttgcctaagtctgcaaacatttggatcattcaagcctcattttttttccttgaaatatttataaaaaaggctgaattattattttttgaaatatgttagtatctgcccccactctgtatttgaccatttatatctcaatgagaaattgcatttattaaagctggcagctctgtgtgtactttattgtgatgtttttgtaattacaatgagcagtgtagcttttcttcccctcccaattaaaatgatcctggcccagaatttcagagtcttcaaggccaagtttgcttctcctggagcatccccaggagatgtctgcccaggcgggaggaggcaacgaaacctcttcttggacccaggacttcaccaaggtcctgcaagagcccttcagccctccctccagcaagagcgagaaccagtgtggtggcctcaatgggtcctcccgcccaacagctgcctttcaggaaacagagactgtaacctgggacttattaaaagtttggagagaaataatatttctgaggttgttcaacctctggctactttgaagtttattcttggattaatccagatcttcagagacctgcatatgggcatgcattattttcactttttgcagaatcactttcactaaattgcatgttagtcttatcttattgacctacttctaaagaatatttggttaagaaaacaaattctcaggcctcatcccagagcctgattcagcatttccaggaacacgctggaaagctgtcagtgtcaaagcgtctctgtggtcagggtgattgccctgtgacatatctttgagagttcatggctagaaacagctgtgcttgttctgagcaatgggcttattttttatcactagacactgtgatacttctaactaatcatgtcatttctttgggttgactgtaggaacctcagattcaaatccacccctagcaaaaatgtgcacggtctcagcacaggtaatttttgtttattttctagcaactgcctttaccttctttcccctctgttgaactttcctcaagcacttaccttttttattatggaaaatgtcagacacaatgtaaacgcttacctttttattacaaaaaatttcaaacataggcaagaagagcaaacataatgagttcttatgtatccatcaccaaacttcaataattttcaacttacagccaacctttaaatatttatttttaatcttaccaagattattggaatcttcgtaagtctcccaaattctttttctaatgagatagagagtacattataaataaccacaacaaatcagcagttcttacatttaaaagtgatgttgcctccccacccctaagaggacatttggcaatgtctggagacatttttcattgtcacaactgggcagggaggagtgttgctcttggcatctagtgggtagagtcagcgatgctgctcaatgccctacaacgcacaggacaatccccaaaacaaagaacgatcagcctcaaatggccatggtgctgaggttgtgcactaaattaaaatgagtatttttcaagttagactattcctaggaaattgactttaaagcacaacttgtgttttcaagttgacaaatgttctaaatatcataggtttggtggtttatagggtattcatggtatacacgctggaatatcagtaagaaactagttgacggtggttgtctctggggagaacttggtggcagggcaggataaagacttactttttcctctatccccatttgtgtcttttatattttataatgcatgcaggtcttacctacttgaaatacatttgaataacatggagtacgtggatgttttcaaaggatctgaaaataaagtttttattttaaagaaagcttttgaaatggttgtgtaaagagaccaaaaagaaccttccgacagagctttccagagtactgtgagcctgtcagacacctagtgtggctcagcagcgcccgggccattaagggaatcagaaacacgtggagaggcggccgctgctcccggcatgatggatcaattgttcgagagcgaagttaaatgcgagggtccctgtgccaagcctctgacactaatgagccctcaactccaggaagcaggtctcccagggccaggcagtgacgtggcttctgggcagcagacaggagggctgggagccgcctgcagcctggccggagctggccacaggataaggtccactcctgcctccatcagctggtggccatctgcaccaccctctgatcctccaaagatggtcactcacccgctgatcctccaaaggacacagctacgttgagctgtaaatggtgacagaagtgaggcaaaccccttgcttcttttgaaaagaaaggcccagcgaacacatctttggaaacattacctggcggtgtcacttccattcttaaaaccccagtggcttttggctgaccttggtccccctctttctcctcgcgtcctctgcctctcaactctggctcccgggctttttgtcagtcccttggattcactgcactcccctccactgcagggcccctgcagatgccgttccttccaccaggcacaccctctgtctcctcttttccttgttacctcctccaggaagccccccttcctccactcccctagtaagtcaacccccctcatgacaggccatccaaaacctgggtccttttcctcccagctcctggagagctgcatcttcaccatctgtgccatcatgtgataaatgccaatctcccggctgggccatgagctctggaagcagcatctaagtccagttggtttgcccgtcccagagctgcatcaggcccatattcactgggactcactaaatgttcattgaccaagagacctaatgaagaacacaaacagccccgccccagaggcaggcatcaatacgcagctcatcgagggaatcctggaagagcagccaagctcaggggagcagaagggtctccaagatgtgggggaatggggtctgggcagcctggaagcttccacggcttctccagggtggagaccaagtctgtggcaggttagagggttgcgtggatggttaccctgactgccccacggtatctcctgcttctcccctctcccgcatggtccccaatggagtaaggctgacttccttggtgccaaaggcatcgatgaccccctgggattggtcagttgatgtggggaggccaagggtggaagagctaagagctcctccagggtgatctggggagaatgaggaagccccttccacactgacccatgagaaaggggaaatgtcttcctctctccaaagcaaggccttccctgactgcagtgaccccagtggctgccccttctccaggctcccaccacaccctgggcacattccagttgctgcatagttcacgatgatgctctttctagatgtttggtggccagctaggctgtgagctccctgagggtaaggactgtggaatattttttcttaatactcaaaccatgcacaatggcccaattattaaggtacccaacaaccttctacagaatgagcttatcattgctatggggcatgacacagacgattcatagctggtgtttttttttttttttaacttgtccatcttgctacgatttctgtcagcatgagcagaaatggagattgaaagacagggctgttggcttcaagcaagacttttatattccttcatgtgtgcattacacacacactctctctctctctctctctcctccccacccctgcccccctccggctactgagagtcctcgctgaagccaaaagtggtagacatgtaagaaaatgctgcaaaatgagaaagatgtatttggtgttgaaaaggaaattgatgaggagaaggagcgtgtggcccccgggtaaggggagctgccctcccaactggcaggtgtgcagctttctcagggcaccccacagaggccctggaaggcattattcctttgcttgctttctgtggagaacaaatcacctctaaaacatttcccagaggaagggccggtggggcgagaattacttctgggggttgaccagccacaggctcagccagagagcagcagctgctgtcagaaagatcacggttggccagcatagccacttgtcagcacacaacggccctggaggaactcacctgccccaggtaaagacagtgagacaagggtggacatcggtgaacttcctctcttccttcaggtcttcactcaagtgtcacctccctggggaccctcccctggccacattcctactcgcaatcgtcccctggccttgtggcctgcacactttcccacccctgtcatgcctgatttttcccctgagcacggatgacgcttgaaagcccattcatgttactgattctcaacatctttctcctgtgattgcagctggaatgaggatagacactgcacctgcactgtcccctgctctgtccccagcagctacaacactgcctggcacatagcatgacattggtatttattgcatggttgaaagaatgaatgaattggagtcgttgaaggctgccttttagaatggtgactaccctgtattcagattcttttcaagatattgtctttctaaatgccccagagtactaggaggacacaacctacgtttaaatttaaaaacacccagtgcatttccaaaagaaagttgctttaagttcgctgcattaaattaaattcactgaactttctcagggctaccctgagatagcccagacatgcagcgggtcttgggaggcttggccattgtcaccatgataccaacttggctcctctccccctgaccccaaaagtcgaataagctctttaccttcattggtgtggaaatagagctcagggcagttttagtagctatatgtggagggagaattggaggggccctaaagtaagttggtttgctaagagccaccctttcaagagaagtcaaagggcagtgccaaatcctgctcatcgccagggtttctcaggtgctgtctggaaagttgggcccatggcatcagcccggtttctaacctggtccccaccacaggcctggatcacatgctcccagtcccctcccagttcccatcttaggtccgggaactcctcctggccttctctagttcttggagacctgtcaagaggtccctgctccatccaactctgctcatatcccacaaattctctatctgctcactgtctaatgccggcaacagtcacagtgcaaggcaagaggctctgggggcaccagccacggtccctacagagatggtagcaggttgaggagagtccttcccaaattcatgctcacccagaacctcagaatgtggccttatttggaaataggattgttgcagatggtgaggatgaggtcaccctggagcaagatgggccctactccaaaatgactgttgtccttagaagcaggcaccaggggaaggccacgtgaagagggaggcagagactgcagtgacacagctgtgagccaaggccaaggaatggtgtggccagccggcagccaccagagtggggagggggcacggaacagactccccttggagcctccagaaggaaccagcccttcctaccccgcaatttcggacttcctgttcccagacctgtgagacaataaatctcttgtactttgttacaactgtccttagcaaacaaatccagagagaccacgatggcttggccccctccccttggcctctgcgctgggagggaggaccccagtgagatctccgagcagatgcactgttccctgcggacaggatttattcctggagcctctgcctcccgtaagctggcgggcagacccagtccaaacttggcactacctcccactgcctccttttcttgcctctcttccctcttcagcccacaaactccttgaggtctgagcatcattttgtccatggctttgggcagggtggctggcacagggtaggggtaccacaaataactgttggagtgtagccagccccttgtttagggaagagatgggtctaacagctgggcatgctggtcttgtgatctggatctgagatgccgccttgggtggtgggtagagggatgaccctgagccagccctgttgcaacagctcctcctgaagatcccagatgctccaagtgccatctctaggttagctgtgctgtaggatcacagcagggggacaaattttcacgtgaaaagaacaatcacatcaagcaaaatgctcactcactgacagagatcaatgaagcagacagcaactcattgcaactgctcctgtcctgtcggtcgagaggagagtgcagcatgacccaacagccctgctgctcccagccgcagacaagccatccttcttggctgctgttttcatcattttttaaaggactgttgagggtgggaggaagtaggaaaggaggtggtttcatgtgagatttctacagtttgctaacagtaaaaaatgggagaagtgataaagttactacattcatcagtcatccaccccgaaacatttgcaactgattatgttcctcagaattggcactgagtcatgaggtattcttgtaagcagtttgctggcatgagccaaaggcaggaaaactagaaagtacctctgaaacacgttcagaagaaacattctcccaagtaataaaaaagatatggagaccagtagttgcttttctcagcggcaaaatatccagcgatactttaaaaaaatggaaataaaatgagaatggttctggcaactgcaaagacgcatgcacttttgctgcctatcttaacagacaagtgggctttctgagtcctgtgctcagtataagatgccccatgtgaaagggagctgatggccatgttgagcgggcacacttaaggacacttaggggtttatgttatatttatggccaagttaagttgatctgttacaggactcattatcctaaaagggtcactaatgacatttgctggaaattttgcccagaatgctttcagtttgaccctctagagatggccatggttgggttgaattaaggctcataactgagccagaaaaataaacctgatttatggccaaactggtttttactgacctgtgaagtaaatgaaacttgaatccctatgataaaacaagacaaaaacaaaacaaaacaaaacaaaacaaaaaatcttcctgaattggaaaaaaaaactctctattttctagaatgaatgcataggaatgtcaggccattctcagaacagcacgggtctcggctttgaaaccttggcctcgctgctgggaggaagctttgatcaccaccccttttcttgctctgagcttgaatgtctcttgctttgggatttctgtttctggcactttctggactactcccttggacatgtgttttaacctgcctgagacttgggggtgcagaggcccctcctcaacctcacctctaagtgggataacccaggtttcccgccacctagggcccagctgacgcacaccaaatcccttggccttgggcctcaacaggagagtgcgcaacagatgggagctaaagcattggctgggcgtcaccagctcttctatgaggctgttgagctaggaccaaggcattacacgtgaaggtagctgcagcctcgaggcccccgtctgttggaaggactcccctcgagctgaccaagggcactgatggcgtctgctatagtcttacctctgccttcagtggacccttggtttcctgaagtaggaggtgcaaaaggcgagaggaaggggaaggtggatttgggaagggggtagatttcaacacaggagggggccagctgctcagcaaggcagtgatgcccacctgaggaacaggcccctggtggtctctggtccagactctgctggcaagctcttgcagtatacgccttccggtgactgtccctttgatgcctccttctgagccaatgctagaaatggccaacaccagcatccaaggccctgcccgcccatttcttgccactcctttccccgcaccccatcttggcccactttggagactccttaggaagggaggtggttgggtgggatgccccacacttcgtggtcagccagccctcccctaccacagccaagcagaagacagctaaacttctgacattggcggtctcactgctagcccctagaaggacctgctacagtcagcaggacctgctacagtcagcagcacctgccaagaagatattcttactcccctttatggtgaggacaactgtgtgtgagatgagggatgaggcatggccggcccacatcattccatctgtggagacaaaagtgactccatcttggatgctaatcgccatgttgactctgtttagccaccgccctgagaatgttgatgtcatcgtgcatatcattggctatggcgaatatagcgtcctcgacagtcctggaggtggccttcaattgtctctagagagcatgtaccccctttccctatggtatataagcccgggtctgggggtaacagtgggacatctacgtgccttgcccctgcccaagtccatgcctctgtctgtaagttccccagtaagccaccctttactgacaaactggatgtgtctgccttgttctctggtttctctgctgttttgacatttggaggccactttggatatatggccctttcatgagacagcatcccaacccccccaggccctgggctcggcggtgcctcctgcagtaattcccacaaggaagcagctcctgctcattcattccttcaaggaactttgattgtttcctgctgcaggcctggtccctggcgctccaggaacacagacccagtctcaaaagaagggcttgtccaggtacaaccacaacacagggttacaggtgccccgtgaggaaagcagaggcaggtgcgtaacagccatcacaggagataaacggccacacaagagaagcttagtcgggtcaggcccgccttgttgggagtgtttcattcacttattccccacaacattcgtgcaagatggatactataattactgccgttttacatatggggaaggcaaggcacagagaggttaagaagcttgcccagagtcacacagctaggattctgaggtcagagtcggcattctgatttttgagccactagattgaagggttgccagcagtacaggcctatagatgtcttaccgccccaccacccgttgatagttaaagttccctgagggcagaggaggatgccacgggatgtgttatcatcaaggaggcacttggtaagtactgattacctcccgcccctgcctctgcagcactgacaggcctgggaagggtctgcaaagtctgatggtctccccatgaccctccaattctaaaagctcccctgacacatgccattccccaaattcttccatatttatagaattgcttcctcaatcattgagcatcttcaacacactgcagggtcccctgagagcaacagccagccccagcctccctggcattcctgaaatgcccctgggctaaccagaggcctggcacatggcaagccatccgcagggatttgtcaaatgaacgagtgaatggatacctataactccgtctaactcagaggctttgaagaggcttgctgttctagaatgcctataaccatgcttcactctgagtgttgcttttctagtatttggagtgcatgaggaggggtttcaagcgaattgccaagatatagcaggctaaaaccgccttggttttgccagaaatccctggaaaacacaagccaaaagaggaggtcttgggtctgggtgacccgtactcagcacgggaattgtcctgtggagaaggtggttcggctcccgtgccctgcacggggtgcgctgttatgcttcaaaacaggacttatcaacgatttagtctcattaagttgtaagaaaacaggcagcgtgttccaaggtcgtaagttttctcaacgttcaaatgtttccaatgttttgtaaaaccaaagagtgcaggagcccacggggctttgctggggtgatggatggatgtggagttggtgaggaatttttccaggctgccttgaaagccagctcattatgaccccatgggctccagacgttttctcgttcctaaggctggtcaggtggtatgtgggacattgcccaaagatgtctaggtcccaccctccatttttagctttaccagaagctcctgagactgcaaatgtgaacacacacagccaggcatctcccaattttctactcccgattttctataggtcagtgtgtgtgtgtgtgtgtgtgtgtgtgtgtgtgtgtgtgtgtgtgagagagagagagtgtgtgtgtgtgtgcacgcacagcatagggacactttttgcacagtgaatctgattttggccgcacttctctagaataaggaattttaagaattctcactttgatcatttcccatcccacatatcagttttatccccaaagatatcactcctgcaaacatcagctcccagtcacagtgtttcactcaggggcccaagctattggtggtcggtgactaatttcagcacttcactgcctggtgctgagagctgccccacagctcacctcggggaccctttcttcttccagtttgcagtttgtagagcaaagggacttagggacttgccatttgcttctcttgggtcctcaattgatcagtgtgtcctccagtactttctagttaaactggcttatattagaggtgggaatgtcttctaattatagcagattcacccagggccagaggtgacctaagtcagaagcctacacagcgatggatgaagaatcaggtggagtgctgcccatggtggccctggacctttttgtgcttggaccctatagtccactccaccaaagcccttttttgggatctctttatgggggtggtaggaagaccacagcttttgagtccaacaggtttggggtggaggtctggctctgcctctgccttgtgtatgagttttggcaaattttctaactccctgactatgtcgcttctttcctctacgaagaaaacaatgcatcctcagtgggaggctggtaacatcagccaggatgaccgatataaaaacacttagaacagcatcttggaaataaaaggtaccagctcccgtgaattctccgtgtccacagctgtcttcttgaaaagtctcaaccaatggaattgcatttcctgttgtttgttgatggtccctgattttggtggattctcttctctctctctatcttttggtggtaagaatatttaacatgagatccagcctcttaaattgtatgagcgtgcagtacagcactgttaattataggcacaaaattgtacagcatctctagaacttaatcatcttgcataattgtaacttcataccaggtgaaaagcaactgcccatttctccctccctctagttcctgacaaccaccatctactctctgcttctgtgagtttcactatttttgctcctcatataggtgggctcaaacagtatttgcctttctgtgactggcttactttatttagcataatggcctccaaatttatctatgttgtctcatattgtagaatttcttacttttttagggctgaataatattccattgtatgtatatacattgtctttatccattcatctgtcagtggacattttaggttgttggcacatcttgattattgtgaataatgctgtaatgaacatgagaatgataatatctgtttaagatcctgattgcattattttggataaataatattcacatgtgggattgctggaaaacatgataattctattttaacttttttgaggaaactccatgctgttttccatagttgctaaaacattttacatttccaccaagagtgaacaagcgttccaacttctccacatccttgccaactcttatcttaaaaaaaaaatgccatcctagtagatgtgaggtaatatctcattgtggttttgattcgcatttccttgatgattagtgacgttgaccatcttttcaaatacctgttggccatttgtaaatcttctttacagaaatatctactcaggtcttttgctcaattcctaaattgggttatttggttttctgctattgggttgaaagagttctcttatatattttggagattacccccatcagatacattatttgcaaatatttcctcccattctctacgttatctttttactctgtgggttgttttccttggctatgcagaagattttttagtttgatgtaatcccatttgcctatttttgcttttgtggcttacactttggttgtcatatccaaaaaatcattgccaagaccaatgtcatgaagtttttccttaatgctttcctctagaggtttcaggtcttaggttaatctttaatctattttgagttgatttgtgtgtatggttcaagataatggtccaatttcattcttttgcttgtggatatgtagttttcccagcaccatttgttgaagagactgtcctttctctggtgtaccggtattactgtcacccttgtcaaaaatcagttgattgtatatctgtgggtttatttctgggttctttattctgttcctgttcctttggcctatatgtctgcctttatgccagcaccatactgttttatttactgtagattgtaatatatttttaaattagaacatgtgatgcctccagctttgtcctttcttaagattgttttggtaatttggggtcctttctggtttcatatgaattttaggattttttttctgtttctttgaaaaatgccattggaattttgatagagattacaatgaacttgtaaattgctttgggtagtatgaatctttttaaacaatattaagtcttctaatccatgaacatgggatacttttctatttatttgtgtcttctccaatttatttcatcaatattttgtagttttcagcatacaagacttttacttccttagttaagtttattcctttgtgtgtgtgtgaaagccagtttataaagacaggaaaggaataaagaatggctactctgtaggcagagcagcctattattcctgttttttatttttttggtgctattataaaggaaattatttttaaatttccttttcagatagtttactgttggtgtataaattgcaactcatttttgatgttgattttgtatcctgtgcctttactgaattcatttattacttctaacaaggtggggttttttttttgtggaattgtgagggttttctacatatgagatcatgtcatctgcaaacagataattttacttctttcttttcaatttagatgcttgtccttgtctggagttatattttgatgccatgaagacattttatttatatgtaatgtttatatattttaaagatttgtgccaagggagtatacttaacaaaaatttaaatgactttaaaaatctttgccttactgctcttacaaggacttcctgtactgtgttgaatagaagtggtgagaatgggcatccttaccttgttccttatcttagaagaaaagctttcagttttttactgttgagtatgttagctgtaagcttttcatatatggcctttatgtttaggtcattttttcctattcctagtttgttgagagttttattttattttattttattttattttattttattttttagtttgagactaagtttcgctcttgtcgcccaggctggagtgcaatgatttcagctcactgtaacctccgcctcctgggttcaagtgattctcctgcctcagcctcccaggtagctgggattataggcacccgccaccacgcccagctaatttttgtatttttagtagagacggggtttcgccatgttggccaggttggtcttgaactcctgacctcaggtgacccgcccaccttggccccacaaagtgctgggattacaggcctgagccacccaggctggctgagagtttttatcatgagggttacaaaaacctgtcaactgtcctttctgcacctattgagattatcatgtgattttttttgataacatggatgaattcatttcttaagatttgagtgcaaacttaaaaacaagaacaaacaaagcttttcatcaaggataaacataaaatctaaacaattctgcaattgtgcattttaacagaaagtacaaatatgaatacattataatttgtaactgcatttaaaaactaaaatatttctctccaaatccaaaacaccacacaatctttaatctgttctcatcttgttaccctagaaacatttgtcatatgctatcaggaaaatataggcaataattactaatcagtttttcatgatcaaaggaacattattctccttaatggtgactttttgaatcatttatctgtatttcatttctgaaatatcataccattatacctccactctagagaaaaaaagaataaatacaaatatcaaggaggcaggaacgttcatggaattaaagcaaaagtcacaagtgtttgacttagaaatgtacatagtgtagcaaatttttaaagtacaactttagttgatggctgatgtgtatgtaataattgtgaacaatttaaacaggtataaaaatgtgagatcaaaatctttaggctcaaatacttatacacattttacgttagtcatttctttctattcctagtttgttgagaggttttttttttttttgagacagattttcgctcttgtcgctatgaatatggaaagatttgtttacataaatatctatatttttagatgaaaaatcaaggggtagtggcatcttcctggtcccttaactatatttggatttttgcaaagaattagtggcatccaaccttaagtgtgaattatgtgtttctaaaggacctatataacagattagttggcagtgttctaactttcgagagatgggggcggatcggaggtgcaaatatctgagataagtgcatatcatgtgatttttatcttttattctgtgaatgtgctattttacatgaatagatttttgcatgttgaaccgtcctggatttcccaaggatatacttcacttgtctttggtaaatgggtagtgatggtgtcacttagtcatggtgtatgatcctttttaattcttccttgtttctgagtaattttttagttgaaaactctctaatagtgggcatagaaaatgtgaaaatatttgttgttactacaattcagatgtgcagaaaatgttgctctttattttttccaaaatggatctgatcttccttaacaagtccctatccactagaagagaaaaaagtgtattataagcctagtcccatccataacacagtgcatctcaaagtatctgtggtaagaaattcttttttgttgttgtttgtttttaatttctaaccagttgcagatactttcataaaatccaagagaaatgaattactgggaaataaaagttctaaaagcatacaaaacataatcttatattttttatgattggtttcaataagcatgaaattattctgctacaagaacttctcaacacctaccctcaatttttgtacctttttcatcccatgccggcaacagtttgtggatgtgtcgcaatcctcagacccactctgagtggtttaaacagactccaagggcttaactagacctatcggttaagcagtgtctgggcctgtggaggaaagaggagagtttccatgctcagggacagggagaagagacctggtcttgttgcaggtctgtgggtggtgctggctgttccccactggggtgggcagccacatgatgtccatggctgatggaaccaagggaaattttttcttgacctgttaggaccaacgggctacctctcttgacttgggggaggacaggaaaccctttgggattctgccacagcctccatctgcctctggacaccatcagacacaggtcacttggttcccgccatagtgggccacttggctgccccgctgcccctcagcttagctatctagtggccacagtttagagccactagaccctctctgccacacgcagctcttccactctcttggtttctcagaggtcctctgtgttggtgaggaaccatccagcaaagtaatgttgccccagtagaaagcatgatgtgaaccctctgtcttctctactcacttcaatgtagcaaatgcacctccctctccctgagtctcagccaggagaggtgtattaagacccacacatctcatggctgactcctccttctgtagactacttatgtcccacagtcttctagggctggaaggagcaggcactactccctcctttttttctggatacaaacctctatggtttggtccttcaagcctggctcttggtatgccagtgggatagacaaagattgaaggaaccctttctctcaaaaagacttgactttcaagactcttgttttgctgcaaaaaaatcctgttttgcataacagaagttgaaaatgaatttttccttttctctgcattccttctgcaatattcctaagatccttggtgcatgaaaatgcagcaaagaaggctattattacaatcatctctgagggatgatagatcctctagctaatgtgtattcataggggtaatgtctctgattaatccatcagcaccattgtcacacagggaaacagataccctgaagaagaggactaggatgggtactgttgaaagagggtgggaaatctggcagggtatggctttctatggggcttcatgagcctgcatctcagaccctctttggcagatttgagtcaccaggagggacccaagggcaggaagtaggctacagccaagagatgggcaccaagaggaaacaggaaacacatgggacatccactttgtaattctgcacccagctcattcttcagctaagtactaagcttattcccattttctggctcttaaaccataacaagacctcttctgaaatattcctgaggaaaaggacctattttcttctctaaggaaaagccccaccaagtctccagagttgatcgcttccaacccatgtgtcatcttgtgtttatgattttcccatcagttttgctttaaaaattaatttttaataatctctaaagaaatgcgttcacccttatctttaaaatattcaaaggatcccctatccattctgtgcttttttttttttttcatgagcaaattacatctggcctctttcccgcctggggaataggcagtgatcatctgggatggagacttggctggttctcagcacagtcaagcggtgtagttttgtggtgagcccactggcctgggaattctaataaccctggcttcatgggtaatttggggtaagttattcattctgttcttcatctggctcctctgcaaaatggggcaaataataatatggcatgatttcgaagccataacaagatgatggaaatgaaagtggtcaccttcatctaaacatgaacttgggtgctgcaaaaatgcagaatgaaatgttatcattcttcaggggagtcatatttcatgaagacctctgtgttttaatcactaacttaaaagtaaaagaaggaaaggaaaaaaattaatgatagcagcctgagatgcatgggctacattctctgctgcttagagaacaagaaaatgcatgacactgttttgaaaagttaatcacggagggctttgaagggtttcatctagaacaagttgcaggtaatatgggaaaaagattggagtcatagcatctccgtgcattattggggttttaaatcctaaatcactacatacagtgcatattctggtttaggctacccaactggatatgttggcctggtttccttaccgtagcgctctctgttaataactaaacatgttggagaaaaaaaaaaagcagggcttttttcaaagttgcaagtcaatgtgctgtaaacatgggtctgaggttaggatattgaattccgtgaataacaacaatctgtcttactccattaatcagaggtttacaatccttacagtcttatgagccatagggccgtcactgataattctctgtcaaagagaaatggaatcatctagacatgtgcttaaagaggaatttttccccttgttgattttatgtaggaaacgattattagaaaatgttggctcccatggaggttcggagactgtgggaagagacctcatggtggggatagtggagatgcgaaagacacgtggagccttttggcagacagggctcagcaaaaagaggtccagcaatttgttgggcaaggtctctgcgtggtctcctctgggacctattccagagcagtgaaactaataatcctcaaattcactccctctcccccaggcgccattacgccatatttgaattatgttatcaaaaagacagacgtggattcagttctgatcccccaaactcttaaggaaacgtgccccttccctaatgggaaagtgtattcgatgacctgaaagttcacatgccttaaatctggccgccctactccccagtcctgggctgcaccctcgttctgtggagttctgagaaatgccgaagatgaggcaggtggcaaatgtggctccctgagagctaaacctgacatcaaaccaggagctcggctcagtgtttgtcagcaaaattagccttttcttgcagtgttatataaattttccatagaaatctggcatgtgtcaagaatatgtgtcaagaaggatgcctgttttcctaacttaggtgtaatcaccaggtgccctacttaaatttatgtgcaagggtgtaggcaccagagaaaactaccagctatcgctaagccaacaaaagccatcaattagggatgaaaagtgtgaagagttgggatggagttgccttccattaacacctctgatttggatccttaagatgacagaaccaccagtaaaacccatttccagtatctagaacaggtgtggtttcgcccctggaggacagccttggctgacactgagagaaggggctgggattgagtctctttggtgagcaacctcctagatgtaattctagagtcaattccagggcgtttcaccagagacctcaggtgatgtgtatggctgtggttgtaaaataatttcccaccaaagacgcccatgccctcatctccagaacccatgagtatgttatgttacatgcaagggcagtgaaggttgcagagggaattaaggttgctaaccaggtgacttcagaataaggagattatcaggtgagcccaatgtagtaccaagggttcttaaatgtgaaggagagaggcagaaagtcagagccagtgtgatgtgagtgagaaagacttgaccacctgttgctcactttgaaggtggagaaaggggccacaagccaaggaatgcaggtggcctttagaagctggaaaagacaagcaagttgattcccccagggcctccagaaaggaacatagccctgccaataccttgatcacaacccagtgagcctcatttctgacctctagaactgtaggataataacatttgtgtagttttaagccacttggttgtggtcacttgttacagcggccacgggaagctaacacagttcctcaatgttttcctctgattgacacaagttacacaagcacaaattttgctgtcctcagaatcattcacctcatggcatgtcaggttgagaacagaggttggctgcacccctcatgtgaatttgaggtgcagggggtcagtttgtctctcagcccagcccttgctgctgctgtgagaatgggcatgaggtcaccatcctctctccctggctctgttgaaagattgctgtctcaaacaccagagccattggtccttcagaaccaaccctgcaattgtattgcagcactatggtttccctttttcccaaatctttttttttttaaatatgcaactctgccttgttggaaagattcataaagcttaagatttcctttcctggtgttgtgctggtaaactggttctaaaagtggcagagtgctgtatatagcatttgcctatttccatcatggcaaatgtcaagctaccagcttaaggttgctgaatgcggagttggcaagagatgtccacagtctgcacagggtgggctccagccaactctgaacatcggggagagggctgtttatgtgccatgcccctgagccttcagaaagcccagtaccctgagagcaaattggcccctaccataaatagtgctgtggagtcttccaaagcagttgtgctttgctctacagctggtgctataaaaaagttctctcatcccccttgccacagctgctcaagatccatggaaattcagaagagccaaggagcagagtcacaagctgtcataagttgattacagacattgggaaccagtggtcagagccagttttaactccagatggtactttctataaatcttttgtcctttttacagttattttttagtctagtttgtttccagacataagtctagtttgaaaaccattgaaacttgaagccatcagtcttattttttatcatattagcatgtctaattttatatctatcatacagaaggaagttagtaaatcccacttctaccactgcctataccaggatctacctgttagtaattcagtatgaaatacttaaaccagtttgttggaggaatcttaacacacatataggagatagcatatgaatgtaataatataaccactaatttgatgataacaaggcatattttataggattgttagaaagattaagtgaattaatatttgtaaagcactcagtcaacagtaagagtttgttaaagaaatagaaaccagtaaatatgacttcttaaaattgagaacttagatctctgacttaggaggagacttagtcaaatatcacccagccctatgaatgcaaatctcagcatcactagatcacttctcccttccggttttcacagaagctttttttctttttggtgacttctcagtcgaactggacccatgcaatgactctgtcctctgagttgaggccctggggcctcacggtcactgcagcccctctgcacaagtgcttgctcttacaatttatgagatgcttcttgcagctgctccctcggaatgatttagatggccttggcttgatcccttccaaatgtgggcaccagcaggctgccatgtgcaaaagcgttttcttatgtgcacatcaagacaaaacagagaaccaaatctccaaaacctaaatgaggtggcccattcacttctagccccactttccctccaaattcaccccaaaggccaggtgagagctcagcctcagcaggccctgattgctgggttcaggaccataaatcagggggctcacgttgatgggtgaggaggccggaagacatccgtctgccatcgggaagaaggaggtgcttgcggccactgggctgattacaaactcgtaagctcctgggagtgtcaagtttgggataaaaggaaaaggcaaacatgaaagatgctggagctacattttccagggcatatcttcatcccatcgtgaattgatctgtggccctggattgcatcaagtacgtaatacctcaaagtcagcgagaaaagacaggctgacattcaggactcaccaactattaggcggcttggaggcagaagcctaccctgcctcacgttggagctttgagggcatgcacattcacatagatgaactcagagaaggctcttgcctagaaattgaatccagtttctttttcctgtatttgttttgcaatctgcccttggaagggaaagttgatgtagaatagcaataaatctccaaggcacatcgcttcaattaagagatagagaagcccagaggggcccaagagctccaaggggagccaaccgcagattaatggatgctgaagaatgctgccttccaagacgggaactggctgatttatgtctattcacatattctgaaggctttaactcaggggccttccttaattacagcacgattacatgaccactttcatttagggggctgggggtgaaagagtctgtttatttgattgagctttaataacctagctctttattacaatgctcttggtgaaagcatttttgtaaactgagaacagtttccatttagtgccctgggttgctctcgtctctagacccatatacatccactttggctgttcttcatatgcaaaacatttgaaactgtccaggctccattcacctcaaatcccaggggtctgagcaaaattaccctggccatttagtttatggaagggggaaggagggaaatcaatgcatttcctaggataagccaaagtcattcattttttttttcatacatttgtttcaatcaaagggcttttatttagtaccatttatttagtacctactatgtggacgtttaacctactatatgagattcacaaataaagatgtttccttttctcatgagctcacagtctagtagggaagacagacaagaaaatcaataattatggaagagcaagaggtctagagaaaggcaaccgggaatggttcggagaagcgctctgggatgagagggccctagagctgaatattaaaggacaagtgggaggttacagagtggatggggtaagccagcttgaccaggcagaaacttggtttaccgaggaattgcaggtcacctgggctggatggagcatgggtggtggaaacggagctgctaaggtggacaaagggttctacttgacctgtgtgacctacatgggatgccctgctcagaacttccttcaagaaagccttccttgccccactttagggtccacctgagcttttgagccaaggtcatgctgatttcagcattgccccagccaacccctgagcaataaggaggcacgaagtcccagctaggaaaaaaatgccaccagtgcggcatcttctatgggcagtctttgctctggagccctctgtctttccctagagcccctggcatggggatggggcagtgggggacagttccgacaaagtaactgcaaacatgcttttggctgatgacaaagcaagatgttaaaagcctaggctgggcaccatggctcaggcctgaagtcacagttacttgggaggctgatgtgggaggatcgcttgagcccaggaggttgaagctacagtgagccatgatcatgccactgcactccagcctgggccacagagtgagaccctgtcccaagaaaaaaagaagggaaatattcatttttctacaccctctttcctcttctcacagacacgccacatatgcctttcattcctttaacagttcagactggggctgtcagtatgatgccactgaacaggccatttgtatggcattgactgtcctttgaatccaataacccatcaacttatttgattaaccagtttgacttttttattattcatttctgaattgagtggttctactggatttactatgctctgctgtcttatagccctaaagttacatgagtgtggtaaagccatttccaccagtaaactacaaataatatggcatttacaatataaggacagtgaattattttatttcaaaacccccagataatgaagtcaatgtcttactctaaaaattagtaaatagtctcggggtgggggcgtggctcacgccagtgatcccagcactttgggaggctgaggcaggcagatcacaaggtcaggagttcgagaccagcctgcccaatatggtgaaaccccatctctactaaaaatacaaaaattagccaggcatggtggtgcatgtctgtagttccagctactcaggaagctgaggcagaagaatcgcttgaacccgggaggcaaaggttgcagtgagctgaaatcgcaccactatagtccagcctgggcaacagagtgagactccgtctcaaaaaaaaaaaaaattaagtaaataaagcgaaagtgttaggctatatatcagcattacaaaagaggcttgactttgagggaacactcttcattctgaaaaaatatgatcgctaactaacagatgtcaaatgaattatcaaattagaaaaccaccattttgtaaccttgaatgaattaactgattcggtccaggatcattaacggatgttacaagtattcagggaagagctgacggagaacctaataacccgcagaaccaaggtcctgtctcacaaatcatctgctggtcatgagggtgggaagatgcctttgtaatagggagagagagccatgggcagcctcccaacccaagcatcaatcttggaatcactgagtgtgggtagcctggcactgatgtgatacaatacaaaatgtacaacttcagcagtgaaggcttcttggcaaaaagtgtttaacctgaatttaatctgtgaacgcaaaagtatctgagacaggtctcaatccatttagaaagtttattttgtcaagtttaaggacacacctgtgacagagcctcaggaggtcctgatgacatgtgcccacggcggtcagggtacagcttgctcttacactttttatggagacacgagacatctattaataccagtaagacgtacactgatttgatctcaaaaggtgggacaactccggggatggctttcaggttataggtagatttaaaaatttccttattggcaattggatgaaagagttattatttaaaaacctggaatcaatagaacagaatgtctaggttatgatgataagggattgtggagaccaaagtttgtcatgcagatgaagtctccaggtagcaggcttcagagggaatcaactgtaaaaagtttcttatcagacttaaggtctgtgttgatgctaatgctggtcagcttttcctgaattccaaaagggaggagggtatgatgaggcatgtccgactccctcttcccatcatgacctgaactagttttttaggttgactttgggatgcccttgcctgagaggagggttccattcagatggttgaggggtacttaaactttcgtttttggtttacaagtcaatcttaagatctaacttccaatgtacagggaggaacaaggacggcaaacaaaatgcatggctgtaaatgaatgtattcttattttttagaattatggacatatatatattatggacatatataataaattaaaacaaacaatagattggcataaatatagaaaactacaaataattatttaatctggttggtgagtacatgagtgtttctcatgctatgtgctcttctcttctgtgtgtttaaatttttttacaatgtaaaataaaaacaggaggatgctgtaagaagaatattttaaaatgaaaacttctaaaagaatacatcccctttttaaaattttttgagatggagtctcgctctgttgcccaggctggagtgcagtggcgtgatcttagctcactgcaacctctgcctccccggttccagcaattctcctgcctcagcctcctgagtagctgggattacaggcactcgccaccacgcccggctgatttttgtatttttagtagagacagggtttcaccatgttggtcaggctggtctcgaactcctgacctcatgatctgcctgcctcagcctccgaaagtgctgggattacaggcgtgagccgccgtgcccagcctgcatctcctttttaccaaacattctaatgacactgtgtagaaagctgaatgttcttggaggttttgtgatattactggcttagattagaaacaactgaagttggaaaaataagccggttagagcacagaaatgcataggacattcctcccaacaccctgctgcagtgcattaataaaagtagttatgtcatgtgtggttaacagtatgtaaggttgtgcaatgaaggtgcttttaaaacctgctcctacctctcttgtaatgcagagctcatacaatgtcatgtggaggtttgctagctgttatttctattctttgtccacatcatggtcagtggtgttcagagtgacttacgaaatcccaagcgaacgtgcccttcaatgcttagaaacactcttaccttcacatctaaggttgcaaaccccaggtttcagagcagttcttagagttggaaggtttccagtgagatgaagggggtggtgcgtgtgaaggagtgaacttcaaacccacccataaactgaaaagatggacgctcttggaacgtagcgccttttgcaactaagaacataccgttacctccaagtgcccggattgatggagacaagccctgccaaattccattctctcggctggaaattccaggatagtgctggtaccggtaagtgacattttcttggaaagtcaccaggggttataaagtacttccccaacccctacgtttctaaggtatgaaaggtaaaggtcagcgtatagaaaatttaaattatcactaaaagcatggcagtggatttaactaagaaaaatccaaaaaggatagagttcaactgagtcattgcaagcccgtttcttaaggactccctccccactccgtgaaataagatctagcaacggaattgccaactcaaagtctcactgaaacacaacaggctttattttataagtgtgttctttatgattctgtaatctgtagcgtacaggggaacctttttgcaattttggtgccgatgctctctgggcttgttatccaaggcttttactgcctgtagtttggtttggtttgttttgtttaggggtcgctatgtaattccagccctggcgtaacctgaatctgtgcagggggcttgtgtgggttgtgtgtgtgtgtgaactgcgcgtgctccccaaacaggaagaccccaagggtgtaccatgcagccttctgtcatgagagtaatgtgaccctttgtgcttggtgctctgggtgaccttccctctgcggagtccaggtgtggggctgtttctccagccaccaacctctaccctccacccaggtctgcatgctggcccaagattgaagaggaaaacttggtctttgtagcaccacacttagccagctgacatgaaagatttactgccatcccttaacccattacatggtaataaatggaagttggcatcatttcttatcagtctaagaattttgaactctggctaaattcctttttctataatcagagggtgtagaaaatcacatttgttttttaaacggatgctttggaagaccctggtcaaaattgtgggctctggagtctgaaactttgatttaaaccttgactctactgcttattaactttgggacctgacatgtgacttaaactaagctttagtttccttgtttgtaaaataggtctattgatgagatggtgcatgcaaattgcttagctcagttcctggtatatagtagatgcctcctaaataatagctattactatttccaatcttgcgcttccctgctccctgccaaaactgaaaatgtgatttaccaaatgacaatcgcagggttatttcaaaacagtgtcttctatgtacgtataggaaatacactgtaagaattggaggggaggccgggcgtggtggctcacgcctgtaatcccagcactttggaaggccgaggcaggtggatcacgaggtcaggagatcgagaccatcctggctaacatggtgaaactccgtctctactaaaaatacaaaaaattagccaggcgtggtggtgggcgcctgtagtcccagctactcgggaggctgaggcaggtgaatggtgtgaacccgggaggcggagcttgcagtgagcagagatcatgccaatgcactccagcctgggtgacagagcaagactctgtctcaaaaaaaaaaaaaaaagaattggagggaaaattacaatactaggtattaagactacagttactgcaactcaaaaagtatatagaaaagggtgtgaattataagtagttacaaagttctggggcccatttaagtctgggtattatgtagaagcttaaccaggtggttgtgaaattttgcaattgatatgaaatatttatttcattaacttttctctctataaattatcctcatcaaaactatcaacaccactactataaaacttttagaagcaaagacctattaatacatggtgaaaactacaacacttcagtttcttaatttatttactatctaattagtcttaaattatttattttatatcaagaaaaatctatgaatctacaaaactatcactagaattatgtggatttaacaaggctataatatacaaagtcactatacaaaactcagttatatttctatatgccagtaacaaacactttgaagtgaaatttcaaaaatcagtaccatttacaatgacattaaaacttcaaatacctagggataaatctaataaaatatgtataagacatctacataaaaactataagacatttctgaggaaaatggaagaggcctaaataaataaagggatataccatgttcattgattggaagacttaatattgttaagatgtcttaaacttattcattggttctatacaatatatatataaattacagcaagtttcttttaaagaaataaatgagctgattctaaatgatatatggaaacatgaaggatctagaatatctgaaattattttgaaaaaaccccacagatttggaagacttaaataatatgagttcacatatgataaagctacagtagtcaagatagtagggtactggcataaagacggacatgcaaatcaactgaattaactaaagagttgctcaatagaccaacaaacacagtcaactgatattccacaaagatgtcaaagtaattcaatggagaaaggaaagtttttgtaataaattttgctagaactaggtatgccttattcatacaatggaatactatacagaaataaaaaactataaactgcagatacagccaacaacacagatgaatctcaaatacaacacagtaagcaaaagaagccaaactccgaagaaggcatagtttgatcaattcatagaaaattcaaataagacaatactaatctatatgtataaatatctacataaatcagaaagtgatgggggagaggaaattgactatcaagggctcaagggaactttctggtgtgttcaaaaatgttttatatcttgttttgattggtggttaccaaagtagatacaattctgaaagattgttgaactgaacccccggtagctgtgtattttatttatgttacttatacctaaattaatttttttaagtaagaaataaaaattccttagaggaggaaatgtggtagaataatttcccaccacagagaaccatcttttccatttatcctaaatgacaaagctttgattgaattattttacatccctgttacatttctctaggatccaggccatgaaagtccttaaagctatcaaaccagtttccaatgcttccttccctccaccccaccctgtcccctgcatctttagatactggcagagatgattttaagaaacaaaattgcatttagcagtaaaaatcaaactgaaaaacagacacacttgtctctccctaagaataaaaatggatagagccacctcactgcattatcttcttaaagaattctcctctattctctttttatggaattgaagtttctacttttgcaaatgaatcctgattaccaacgccggtcatgctgtttgctgtctcatctgccgtcatgcagtgtgcaggaccccttggtttactcctggcttctctcttggttctatcggctctaacttaccctgaggcttaggggtgccaaactgtgatactcagcaaatgatagctaataacatgaattgagcccttcctacatgccaggttctatcctatatcatttacttatattagctgaattgtatctccacaattctcctaagaggtaggaccatcattattcccattttacagatgaggaaacagaggcacaggagggtgaagtaacttctatcgagtatgtgtcagggttagggttttgactctagatagcttatctcagaatccatgtctttgtcgcaatgtcatgcaacctcactaatgctttagccaaagggaacaaaaaaaaccacaagcaagtgccactgctgtgcactgtgtctgataatgaagacagtcttggcaataggtacagtgctcgcatgaaacatggacaatgtttatcagcataagtaggcactcacaaatgtagttctgatttcatagaagcttatggtgttgaattttattacattgcagctgttgatgtcattcctctggatttatacctggtttcactgaactacctagaggaagaagccttcttgcttttggggcataaataagagcatcacccgccttccagggagatgagctcatagaccctgtatacgacctctttagagtttgttaatggagactgtaacgacatttctgcagtgactcccgaagaccctcgcaccatccagaaacgcattgaattttatcttttctttggaaatcgatcttgctattaatctacttgaaggcaaagtctgtgtaacccaaaattatcccatttccatgtactcagtaattaaaaaccaaccaaccatcccctcttaacaaagtgaggtaagaatagaagtatgttttgctgacattctctcaagcccagatatataaacctgcctagattctaggcagtcagggtcacttaaaacaagctggtgaactaatcattgacacccaatctactcattacaacacatagaagtttctctctctttccttacttccatctttctttctttccttgaactccttgcccaccctacacctaactcacctgcctgctctaattatttaaccttccatggttggcagaaactcaagccttgaaataaaactaagccgagatgtaatttacaagttgtgagtgccactcaccgtgctgctgtgtcctcagccaagtccagtgctatatctgaaagttcttccggagctcctcttgaacatcttactccctctcttggcaggtgcctggctcgtgacttctgcctggctgggctgcctgcctctctcagcttttcccagcttgccctccccaccaatcagaccccctgctttagctgggcctcagggtgctcgtccttcctggactcccggcgggtgcccagcccgcgcctgcatcagatatctctcaggccttccccagatcccaggcctgtggcacacctagtttcagctatcaacactgccctctcagtacgtgccattcctactctgtccactctgaaaagggaccagtgtctctctcggtctccactcacagagtccctattctctcaacaaaaggccaatcaaataccaagatggtttcactgacgtctagcccagctcaaatgaccggttttcttaggcctcattgttgctggcgactgctggtgcctcttggtgttcaaattcagaagaaagcccggactgagagtggcattaggagacaggaaaatctctagagggaaagcaagggcttgaagaggggcccatggaagagacatgcatggcaggagggtcagtgtggaggccccagttgcacgccccagttggacagaaaagaacagggaagtggtgaatgatgggtgaatccacccaggcggccaagagagatatacacagatggtgggtgtggtggctcacgcctgtaatccctgcactttgggaggccgaggcgggcagatcacttgaggtcaggagttcaagaccagcctggccaacatgacgaaccccatccctactgaaaatacaaaaaattagctgggcgtggtggtgcacgcctgtaatcccagctactagagaggctgagggtggagaattgattgagcctgggagatggaggttccagtgagccgagatcatgccactgcactccagcctggcgacagagggagactttgccttaaaaaaaaaaaagaaaagaaaaaaaagaaagagagacacacaggaaatgacttattaagcaaaggggaagtccaaggaaagacaagaatattctttaaaaagaaagtgagatagtggaacttgaagaggaggactgaaactgttttgttgtgtaggaaaggtgaaggaaaaagaaatgtcttccctctgtgtgttttctgcccctgtaatttttctaagcttgtccgcctccatttccccacaggggcctggggaatggacaggttagctgtcttgctcactggaggagcccacattattctagagctggacctaaagcaccccgtgctcacccttgttcattgtttgttcttccctggcaaagtctatcttctgattcaagtttaatcaacaatatcatatgtactggggcttctggtgtctcagcctctgtcctaagcaccagggcaattcagcatggtgaaccaggaagcaaaccagacttggagatgggcgggctggggttatttgttgttgctgtttttattgagccagggtttgagtctcagctctgttacttactacttgtgtagtcttggatgagcaccacatgctctctgagtttttgttttgattattaaattgcggttaggaatactggcagaatcaagtagtagaagaggtgttaagtacctagcacagcactcttcactcactgattataaatgcccccaatgccccctgtttcctgcatccatgcccttgcaatgtgacatggcagacctcccatcagaaggcagggctaatgctccatctgatctgggcttgaccatatgacttactttggccaatgagacattagaaaatgtgacacaagcagggatctgaatggtgcaggcactggggcttgccttctcctgcagctaagaatcctttacacaccatggaacaagtgaaagctagcttcctgggggatgagagaccatgtggagagaggctccaaccatccagacttccacctgagttccagacattaaagagaggccatcctagaccacccagccctaacagagctgacttagacccgaattgattacctagctcacagaatcatgagatgcaatagatgtttattattttaagtcattcagtttggaggtctttggcttttgtagcaaatgctaactggtatagtaactaagagctggtcataatggccaacacttattgagacctttaacgccaggcactctgctaggcatgtgctggtcttctaagctgcatctcctggtgcccataacagtcttatacactagaggtgcccaggagaaatcactttaagaattaaaaatttttatttttattgtacctgaatccaggaagtataaaaggatactaaaatacaatcaagtaactgcaaaaaataggtgtacaggaaataaatgcaagtgtgggagacatcaaatgaaactaagcatggggcaaaaaacaaaagcaaacaaatatgtatatggtggctgcaggcaggtatattaccttgctaggactatcataacaaagtaccaccaactgggtggcttcaacaatagacatttgttgttttagcgttctggaggctggaagtccaagaccaaagtataagcagaattggttcttccgaggcctctctccctggcttgtagacagctgtcttcttcctgtcttcatatggtcatctctatgtgtgtgtctttgccctaatctcctcttcttataaggacacctgtcatataggattaagactctaatgaccccatttaacttaattccctatttaaagtgcccgtctccaaatacagtcacattctgtgacactgggggttagggcttcaacagatggattttacagaggagatgcaattcagtcccaaattgtgggaaatctatttgctctacgctttccacagccaacacccaaagggaaacctagacagatacacaagttcatctccataaactcatgaaaaacagaactacctaatagctagcactcagcccagacaggtttccacaagcattctcatttaaaaaaaaaaaattttgtgaggcagtgatatcttcaatgtttctcttatagcagaaacaatggtaagtttcaaaagatgtctctgacatcccgtctcaagcattgaccaatgatacaaagtggaggagaatgaagtattgatgcaatttctctccagccttattaaatgatggagtagccaccagacagggtggctatcaatctctccaccaatctttcccctagaatggctctgtttctttggacattaaaggggtttttattatggagagtttcccattaaaacgcagcaccacagttgagtgcctgtgaaggagagaattacatgagcacggcctgtcgaagaccccatggacaaagggcaagagagaagcttccagataagtgatggcgtgtgccaagggcaagcttcctgtattacattttaggggagacacagcttagctccacagcatctttcccctcttgtgttggacatttttttggtggtttgctcccacggcctatcctaagggaagataattttgagaggtcatctgcagataaccacatcatgcttctacaagtgactcacctctttctggtcttagctgatcatcaactgacccaggagctgtccacctatgggttggccaatgacagtgacctatggcctggcataagatgcatttggccaatcaaattcctgctctctcagaggaagtgcagagatgggcagttggtgagagctgctggtgtggggcaggagaagccataaggcactaaaaataacagcacacctcacatctatctggatggctgttatcaaaagaacagaaagtaatgctggtgagaatgtggggaaactggagcccttgtgcattgctggtggaaatgtaaaacgatgcagctactatagaaaatggttgagggtcctcaaaaaattaaacgcagagttaccatataatccagcaattccacttctaggtgtatacccccccaatgttgaaagccgggactcaaaaagacatgtgtacacacatgttcatagcatcggtattcacacactctattggttctgtttctccagtgaatcctgactaatgcatcttccaaaagaatctacagaacagctggggagcatgagtctaaggtctgtaggctccagatgaaagatcctgtcgctgatgctgggccagcctacaagcaccccccagacaggctgtcacagaacagtagggctgacgaaccacgttcagttgcttgaatcccatcatttagtacatcagttccaaacacacagcaagaaacaaagggagagatctgcagttggttgacactgcaggatctggtgccttcagggtggaaggaccacagccctgggtcctgggctatgcaatgttcacaatccgtctctgtctgcccatcagtctcccctgctaacagtgtggttaccaggaccagtcaaatagtcaaacaaggaggcttagcagatggaagctgcccagaaactgcacatccttgtcctaccaaagaaacacaagagcacgatcacctggccagtatctggggctcgccagctgacctgcggagtggctgtgggctttgtttgcatttcttgagcagagcacatatggtcccatctatctttgtcattcatttctcttattttctccagcagaattgaatggtcttaaaagagtgaacatgtattgcagatgccgtgagagctatgatggtgaaactgctgatcttcctagtactttaaaaaagactttctacaaagatcctttctattttgtgtgtttgttgttgcaaataagtacttgattagaggccaagcgaaagctggtggtttttatctcatgaaggttaggatctgttttgttttccatggatgctagaagttgtgaatggaaaaatgaacatcatctttgagtaaagacattttagaaggagacacattttgattgtaaaaatggaatgtgactgggtgcggtgtgtcacacctataatctcagcactttggtgggtggattgcttgagacaaggaattggagatcagcctgggcaacatggcaagaccctgtctctacaaaaaatacaaaaattagccgggcatggtggctcatgtctgtactcccacctacttagaggctgaagtgggaggatcacttcagcctgggaggtcgaggctgcaatgagtatgataacaccactacactcttcagcctaggtgatagagtgagaacctgactcaaaagacaatagaaagaaaaagaaaatggaatgtaccgggccaagggaaggagagcaaggagaaccgctttgggtatttgtggggtccccccaggactcactactgcaggaggatgcagaggaaagggatagggtggagagcgaggcatgctatccactgaaagagagggacaggcacatgtgtaagttgtaaatctcagaaaagagaagtaaagattagtagtgagaaatgggaaagccgagaggtgttatttgaatgcacacattgaatgaatgaaaaaagtctcacgacaggattagatagaaaaatgcaacgtttcctttttaaccaaaagaggcaagagttcgcagaggaaatagattgtgcttgagaacagccatggcaatttttcagcaatacaatcaggcattttaggggaaacttaataaatggcttggatctcagtggtcaggaaaggatggagaacagatatcaaaggctgacatagattttctgagcagaaaaaataaggtagagagagaataagcctgggactggggacagagaattcgaatgcccaaggtcaaattcagtctgctaatgtctgcctggcccctgcacaaggactcgttccatgaggcagcgcctgcgcccacatgtgtacagttgacttccaccgattgttcacccaacgtggaccaccttgcctcagaccctatttgacacaagttctatctccaacaaaccagctgtcaggaaatggtctcaaatctccaagaacagaaacttctcttgacagtgcattctgttaccttcagtatgaaaactggcaatgacacagcaagacctgcaactcaggcttcctgtccccagccctccacaatgctaagagcaatggcagagcacctgtccaaggcctcgaatgagctgttggctatacagaagcatctggaaggatgcaagagcaccctagaatgactatcataaaaaacctgccccattcccccacaaccctttcccagcccttctgtaatgtgtggttaaactgagtctcatccatttttccttcctgctaaagactaagcttgggaagagagtggaggggaggggtgctggacttgagtgtggagacagagtggcttcctgggccccgaataacctttgggggcctgcctgatgaccctccacagcaaccatgtggattctggtactttcactgcaaaatgaaggatgcaggtgatgggctgggagggctgcaagtgtccaggaggctcagagcctcagtagagatggaaccataagatatcccacctctgccatcacccacacaatccagcaacatccccagtgccacctggattttgcccattcctccatcatctctcctcccaaagaaaatctccctcttccttcctcaaggggtccacatgggtggccaactgctggaccattctgaagtctctaggaaataagcctttcctgcctcttccagctcctggtgtttgttgggaatccttgctgttccttggctcatggcaacataattctaatctctgccttcatcatcacacggtatcctccatgtctgtgtctccatgtccaaattttcctcttgttataaggatacagtcatactggatttagggccccctctaacccagtatgacattatcttaacctgactacatccataaagaaataccctatttccaaatgaagtcacattctgaggtcccaggtgggcatgaattttgaggtgggggggatgcaattcacacaagcgtcatcacttaagggtaatgaaggccagaacttttgactttcttggtataaccaactttaattacaatatcctgagttttttccccccaaagtcactctgaaatgaccatctacccttttccattccataaacttagtctaatacagacagagctcagctttcaaatagaggagttttcctgagctgctgcaggtaagggcgcctgtttgcagtgtctgttggccaggccaggttgggggtgcccatgggaagaaggaaacccacaggatcccatccaggggagggagctcattagcataacccctggcttgctctgcccatcatgcacgtctagcatcctgattggtaggtttgaaaggagacctgggtcatgggcagtaagaggtcctgcatctcgatttactctcaggagtgactggcacttccagggctgggctcctccaaggatgggctcatccctgtggggtggagtaggggtctgtccagttccgccacacccaccccacccaccccccacgcccaccccacccaccccccacgcccaccccacccaccccccacgccaaaattggacttctgtattagggagcttatttgcccaaagatataagccacattctccaacctagactgtcagttataaacgtagtctttgggctggaataaaggcagtctttgggccaggcacagtggttcacatctgtaatcccagcactttgggaggccaaggcggatggatctcctgaggtcaggagttcaagaccagcctggccaacatggtgaaatcccgtttctactaaaaatacaaaaattagccaggtatggtggtgggcacttgtaatcccagctactcaggaggctgaggcaggagaattgcttgaattcgggaggcggaggttgcagtgagccaggatcacaccactgcactccagcctgggcgacagagccagactccatctcaaaaacaacaacaacaacaaaaacggtctttgcgactccattggcctcatgccttttttcacctttcatttggttcagaatttgggcaggaagagtgtgccatttaccagacacccccaataccttggcaacacacagggctcactttgaacaccaattaacttctcaacagttcacacacaatccatgcatgggagccttattcccttaatacgccaaaaaatatacctgaagctaaaaatataccaacccaaggcaagcttgaactttccataaaaggccattaagagaattgatttcatctccgggattattgccctgtgacagctggtatgcattccaaatacagcaacaaaagagaaggccacgctgtagaaaggagtttaagtggaaaccttccatacaccaaaatctcaaaggagaggaagttgcttgccacccccttggttacagttcatagtcataaaggctgtttctatagaatagacttccacgattatctatttgcaaaaatgtacaaacacagccagcatactctgtgcctgtagaaagacctggatcaatacaagtaacagaagaatgaagaaaagaggaaaaaaagattttatcaaggctgtttactttaagggtaccttaaagacctgcacaaacacacctgctacttcagtgccaggaagaacagagcaaacatggctctcctttaaaagaaactggagaaagagactttgcagccacaaaaccagtcacaccaggaggcgctagcatctcagcaagtgaaagcatagaagcctcatcttcagatcaaagttatttaaaaggagcccaggatcacacttctgaattaagcctacatcacatcggggacagtaacatgttgaggaatgtttaaccacaaactggatcaccagaagggaaaaatctcctgattcctagcatctgcccatttctgtggtgtaaatactcccacagtagctgatttcaagctgccagcattggcagagatgtgaaacaccacaccattgtatagtatttccaccctccagatacaataggtgcaaacaacttctagagcataggtaccagtaaaatgtactaacacaatcaggaagtaaaaaatgctaaaacaattaggaagttgaatgtattaaaacaactaggaagtgatgagttttgagtatttattacttttgtggtaatataatttatttaattgtaagcttatgattttaaatttttaaatagtgactcttttagctaccagctcacaaaattccggcaaattttacaattggctcaagctggggcaagtctccttcaacctaccatggtctggggagcgttttcaaagtaacaaagatcttcctttccctacctcaattgcgggaggcccattgggacaaaatgccccagaggcgaccacatgtgcatattttcttttccttccttccttccttccttccttccttccttccttccttccttccttccttcctccctccctctctctttctctctctttctttttcttttttttctcgcagtttcgctcttgttgcccaggctggagtgcagtggtgtgatcttggctcactgcaacctccacctcctgggttcaatcgtttctcctgccttagcctctcgagtagctgggatgacaggtgcgccaccatgtcccgctaattttttgtatttttagtagagacagggtttcaccatgttggccaggctggtctcgaactcctgatctcaggtgatccacctgcctcggcttcccaaagtgctgggattacaggcgtgagccaccatgcctggccatcatgcatattttcaaaagctctccagtgcaattctaatggactccctgggtgagaaccactgctgtgtcccacccttccatgttacagaaagggaagctgaagttcaaaagtttaaatgttctctctgttggttaacagatgaccgagctggagaatgactattagttgggttctttctcttcccctagaccttccccccaacaattatgtgcaactttggatctcttctggaaatactgcaccttataagcaccttatttgaaatattgcaactatattagcagtataggccatataccaaagcctcattactttaaaaggaaaaaaaaaagagagatgggggggcagtcctactgtgttgctcaggctggtcttgaactcctggcctccggcgatcctcctgcctcagcctcccgaataactgggacataggtgcattgcattcagcttacttttgcattaccttaacaataaccaaaataaagtttaccataatatcatttatttttaaaaagggtttaacaaggaaattcataggtaagccaaactagaaaggagacatcaacgtcctcaagaaactttagagaccagctttctctctgtttgtatataaaccatgtatatattaataacaaaccattctgatctatatactaagagagggtcaactgaactggcaatgtttagttagtggttattttaacttattcttaattaaaaataaagttattctagccagttgcagtggcatgttcctgtagtcccagctactcaggaggctgaggcaggaggattgcttaagcccaggattttgagtccagcctggataacatagtgagagcttgtttccatttttcagaaaagttgttctaggtagcaagattatggtgatttactcttccatatttcttctaaatcttcttcaacaagcttaatgctgtagtcctgtcccatatatttttaatgcttttataatcagaaaaattgactttttttttaacccaagtcaattgcatctctttccgcacccagacttttcatgaatttggtttggcttctcttttaaattttcccaagacagcaaggaaaagtgatccagctaagctttccttttaggactttttactgactctccccagcgatttgaagataacctcctcctgagctctccaccccactctgaagctgcgaggtccccaccgaacagaacacggtctcctgagtgtcccaccctgctcttagcgggagaactcagctttcggctcccataggcatggaaacagttaccaaacactggttcctaggccagtgtctctcctactgctagttgaaagaatattccatgactcattgtggactcatctcccaaagatattaaatctgagtttcagtgaaagccagtccaggtaagccctgtacaaataagaacacgcctgagctaaaaccaggctggtggattccagcatcttctctgggctcttcctgtgtctcagagcgtgagcttgggcttctactccgtgcctgggggacccatgccccctgccaccccatggctggaagagtacccctgtctgggagaaatcagctataaacgcagaagacaagagccctgagggaggcaacctttcaccaggtccaggggcttctccattggtcctcacggtcgggctcattatcacagcatcttctgatgatgtctttgccttgctcccatccctgtgggtggtgaagggccgggaaggcaagtgtgcaggactgtgggtgctgggcttatctggaggcatctgctgaggggaggccagcacatgtttcttaagaacaagggcacgcgtcttatccccttctcttcctggtgggccgggctccttggtgcaaagcagctcttttttttttttttttttttttttttttgagatggagtttcgctcttgtcacccaggctggagagcagtggcgtgatctcggctcactgcaacctctgcctcctgggttccagtgattctcccgtctcagtctcccaagtagctgggattacaggcatgtgccaccacgcccaactaattttgtatttttagtagagacgggtttctccatgttggtcaggctggtctcaaactcccgacctcaggtgatctgcccccctcggcctcccaaagtgctgcgatttaaaacaggtttattggcagggcgcaatggctcatgcctgtaatcccagcactttgggaggctgaggcgggtgaatcacctgaggtcaggagtttgagaccagcctggccaacatggcgaaaccccatctctactaaaaatacaaaaattagccaggcgtggtggtgcatgcctgtaatcccagttactcgggaagctgaggcaggagaatcgcctgaacccaggaggcagaggttgcagtgagccgagatcaagccattgcattccagcctgggcaacagagctagactcctgtctaaaaacaaaacaaaacgaaaaacccaaaaatcataaaacaggtttctttccacgttcctgatagtttctggcttctgcagccacacagaccttcaccactttctaagcctgcatttgctgaccatccccacatcctaaaccaagccctctgacctcagttgttcctgcgaggatgccttgtccggagatggcagaggttcccgccactgcttttccgtgcctgccctcccgccactgcttttcccagcacaccctgccaccccagtgtggaggctccactgaccatcacggggagagttctatcggcacctgcctcctgcccctgtgagatgcgtcttgggggagtcatgtggcctcttgacacctcaattgcctcactggcaagctagggataataatgtcacctcctgaatcagcgtgggcattcaggagctactgagtgtgtaaaaccctgcaaaaggcagaggccactcccatgccagaaacagtctccacgtctccttctacagacccctcctccgagtccccttggtccccaaggacagcaccagccatcctgtctccatggcctttgtgttatcagtagggctgccagacgaaacacaagacacccagttaaatttaaatttcagataaacaacaaataatattgagtataaacatgtcccgtgcaatattttcatttgctatatctagtgacctgaatctaatgagagggcacgtttcacagggctggacaccatgtgtgtttcatctgtgctccccgaccctccctcctccctccccagcctggcacactgccgggcacatggcctcagtatccaataggccggcggttctcagcagggtcaggactgccccctaggggctattttggaaattcgaggaagcctttgtgattggcaggattacagtgggggacttcctggccttgaggggacaggagccaggggtgctccaggacctgccagaattgtcctctctgtagagagttgtcctttaccccacacaccattcaggtaaatgacaaacccgcttaggaccgtctgagcctggaaactcactccataggaacataaagtggattttgtgctgtatttccaggaatgcaactactgtactttgttttagtctcatgacaaattgcatctgtggttttgaggcctcggtatattacacctgcatcagcccctctttgtggctgtggattccttcaattgcctctttctgatggcttcattgtgtcttctagtgtagatagagtgagtgctcaagcacattaggcattgaatatattttactttattacaaccctccactttccttgtatttccttcatattgcacttaatatattatgtgtacttaatgcatgtctctcatttcagattctgtgtcgtgataggtatatgtaacaggaatctgcactatcgtctgtggtttttgtttcaggatggtaaaaaggctgttataaaagatttgttatgaaaggggtcacccctagaacagttctgtgtcttgatcatagtggcggttacatgaattttaacatgtgataaaaagacttagaacgattgcatacacattgtgccaatgccaagtttctcattttgctactggaccactgttacagaagatggagccatcagggtaaactgaggaaaagatacacaggagctctttgattatcttggcagcttctcttgcatcgagcatgatttcaatatttaaaaaaagatttttttggtgcttatttatttatttatgtgagacagagtcttgctctgttgcccaggctggagtgcagacatgatctcagctcactgcaacctccgcctcccgggttcaagcaattcccctgcctcagcctcccaagtagctgggattacaggcccccgccaccatgcctggctaatttttgtatttttagtagagacaaggttttcctatgttggctaggttggtctcgaacttctgacctcaagtagatccacctgcctcggcctcccaaagtgctgagattataggcttgagccaccgtacccagccctgttaatttatttatttttaacttttattttagtttcgggagtacgtgtgcaggctggttatatagttaaattagcatcacgggtttattgcacagattatttcaccacccaggtattaagccccgtacccagtaattatcttttctgctcctctccctcctcccaccctccccctcaagtcagccccagtgtgtgttgttcccttctctgtgctcctgagttctcatcatttagatcccacttataaatgagaacatgcggtatttggttttccgttcctgtgttagtttgctaaggataacggcgtccagctccatccatttccctgcaaagaaaatgatctccttcttaaaaaaattatccttttaagcgagaggagtcaccaagtcctgacttcaggttgagagccacccaagaggtggatccaagggtttctcttccagcctgccggctagtcctgctttgtgtggagttcctcctcaggagagcttgcctacgggaaggtgcaagcacctgagagctccatccacttcccagcagcagaaacggggagccgggctgctgcttccactcctatctccagcccttggttgcttgtcctttggggtagccagacgcaggctcaaaccccaggtcgtatggcaggtggcctggccttagaaagtctaaatgaaggcagaggggcctcggcgggtcacacccctctgcactggctgaggcccatcgcccacctggctcccctgccagcccccagaccccggcccctacccctcacttctcactgtcggtgggctgcttccctcacttctccctccaaatccacctgcacacctgggccacgtcctctgcagaataagggaggccttgaatgtgaactaattttatttagcataagcccggctgcccgggtcttctgtgcacgtctcccaactgggatctctggaatctctctctcctggctgtcaggtgcacctgcccaccaggcctcacagcccgcatcactacagatccagccggggtgagtcaccaacagcaaaaaaagggggtgggaggagaatgcacgtgtacacacttcagaattcgtgaagctctcctccattcctggctccgtgtcaggcaccaaacagacacataattcacaagttctcccatctgccctgaaggattcaaggtcagacagtagaactggggggccactgtcatcccagggtgcctccttacacatctgagctgcgaggaagattccgctcatctgcagggaattaaagcaggtgagcaaaccgttactgctcagctgctgttagacagtgggatgggaaatgcttaacatttggaaaaggagaaaaggaggaaaaaggggatgattttaaagacagataacttatttcctggacaacattgaaatacattaaaatatattgaattacgttgaaatacattgaaaaacattgaaatttcctagacagcatgaaatacaacttggtctctgggcccaaggccagaacggtggtcctgttgctcctgtcttaggtgagcttgctcccccctctcctggccctctctctctctctccccttctcttctccttctctccttctctctcgccctcttcctttcctctcttctgtttggtcttcctccctctttctctctcttcctctccctcctgctctctctcccctactccctgcttctctccatgttatcccaggattcctcgtcacctaacaacattgtcacctgcctatgagtgggacgttgaatgtgtccattctgcagggagagagggacactgacggctgcccttcatggggaagcagcatgtctttccccctttactttaaacctctttgctcctctgactttcccatctctgttccccttcacctctcaccctctctttctcattgtcctctttgtctccctttccttccccctttctcatggcagaaacagtgccctattctcaccagtgacttcccgtcgctggaaggtggcatgtcccggcctcccttgcagctagagggacaaatgctactccaggcccacctggaaagccctgtgcagccctggccaccttgcccactgcctgagggcaagcttagaggcatgtgctggaagagtggagagcccctactcactctgcagcggactttgtcacactgagccactgagactgggggctatttgttaccacagccaacccctgcccatcctaaagattacgctcctcccctccatgcataagcccggctgcctgggtcttctgtgcacctctccctgctgggatctctggaatctctctctcctggctgccaggtgcacctgcccaccaggcctcacagcccacatcgcttgcagatccagccggggtgagtcaccatcaatagcaaggacccagtgcccagcaagcctccattcactccactccttcacattggtgggacaaggctgggagctgaagtcacaaaacaaggcctggtaacaacactccaggccctggagagccctctgcccccggggccctgacaagagcctcccagggaaggctccatgcctctggggaagtgctggaagctcagcaagaagctctctgtgacttagactgagccgggctgcgcaggtgaggtccgcagcattctgctctaggaagctagccttgaccgtgctcatgacctcccagctctccagcccgaggcatgccccagtgggagaggaggagggtgcagaggagagcagaggaaatgggtgccataatggttcattttatgcatcaagttggccaggccatggtacccagtcgtttggcaaaacaccagtgcagatgtttctgtgaaggtgtttttagatgtgattaacatttacatcagtagacttcaagtaaaacagattattctccacaatgtgggttggcctcgtcaatcagttgaaggccttaagaggaaaggctgatgccctccagaatgaagaaattttgcttcctgactgcgacatagaaattcttccagagtttccaggcttcatagtcacgactacaacatcaactcttgtcgaactttccaggctgccagcctgccaggcgggtttcggacttgccagctcccataatcacgtgaaccaattccttaaaatctctctatatagatagagacagacagagacccttcccttcccttcccttcccgtcttcttttccttttcttttcttttctttctttccttccttcctcccttccttccttctttctttctttgccttgctcatcacccaggctggagagcagtggcacaatctcagctcgctgcaatctctgcctcctgggctcaaacaattctcctgcctcagcctcctgaatagctgggattacagatgtgcaccactatgcccggctagttgttttttttgttgttgttgctttttgttttgttttgctttgtttgttttttagtagtgacggggtttcaccatgttggccaggctggtctcaaactcctgacctcaggtgatccacctgcctcggtctcccaaagtgctgggattatagacatgagccaccatacccagctttttctctcttctttctctctctcttttctttctctttctttctttctctctctttctctttctctttctctttctttctttctttctttcttctttctttccttcctacccatctttggtcatcttattggttctgtctttctgggggccaagagccttgcctggtggacagggttcatctgcagaagaagagagtgatggggagagaggaaaagacggggggagagagagagagagagcttgtctgcatcttccagctcttctgtcctaggaagcacctgtggccttagactctgggtgactctctgcatccccttggcctcatccagtttgagacaaatctctaacatgactgacatagaatcctaatacttcatttagatggacatattcagacctcttttatttagttgttggaatgaatggaattaaattttctaacaatttgacttgagtgatcagactagacttaaaagtcattttccatttccaggtctcagatagacaggagaaagcttagcaaattttaaagactactataggtgtctaatctggagaataaataaagacactctctcccccagaaaactctcaaacacatgtttttgttagtggcaacatggaggtctgcaaggatagatacttttttttgagacggagtcttgctctgtcacccaggctggagtgcagtggtgcaatctcggctcactgcaacctccgcctcccagattcaagcgattctcctgcctcagcctcctgagtagctgggactacaggcatgcaccatcatgcccagctaattttttttttttttttttttttttttgtatttttagtagagacagggtttcactgtgttagccaggatggtctcgatctcctgacctcatgatccgcccgcctcagcctcccgaagtcctgggattacaggcgtgagccatcgcgccctgccaagggtagatacattttttaattgcctttaatttttgctgggcttttgttgaaggatctaaatctctttcatgaaacattcaatgttgcacagctttctgctatgtcagtagtgaaatgttaaatctacaaaaacgttatcctgagtgtcttagtttggttccaactgcttaataaagaagaaaatacagaatatattaaatcaattatcaaagagttcactcaacccaaaccagcagaatagcatccatggcattcaccgcctccagctggcctgatctggggcttctagctagcttctcaatctatcttcttctttccttactaatacaactggattctgtataggctgcaatgtgctcaaactaaaagactgcatttccctccctctcttgcatatgaaagaaaccaataacatctaaacagaactcttcaaataaagccttttgccctttgctggctccatatctggaatgtagatgtgctagctggagtgccagcagccattttgggacaacaagcccaccttgaggagagaagctaataaggatagccaagcagaaaaactgagaaacctaaatcctagatggagctaccatacaagccctgcactgcctccctcctagcttctttcacatgtgcaaagaagcacctaattcatttaggctactagtaacagttacattgctgttactagtgttcacacacagttaataactaattcaggttgaaaaacatcttttctaaaatgtgttgttacataaaaaatatgaagatcacaattgaaagagtatcaacattttgcaacctggtcctgtgcttcatttcctatcattgaagcttctagtgccaactgcagcattccagaaggcagtttcctccaggttctggatttcttctgcctctcaaaaatctaattctgtgagtttgaaatctaattctgtgcctcctgtctctttaccttcaaatctagagctttccttggggctgtttccacaacccccctccccacccccatcacacacagattcttcctcatcatgcaccaggcacctgtctgcctgtccacctgctgcacctcaaggatgccatgacatcattgtatctaaacaacccaactaaccaaacaagtcttactgcaaatcccactctcccaccccgtatgtatcagatgaccttgggatcaaccttggtaagagagtcttcatccagaaggatcaggtgatccttgtcctttagtatttgtgttttccgtcttgtgtcctgtttgggtagagtacatagtggttgagagatggggtttggggtcaggtagccccaactttcaggcagacacatcacttcatgtctctgagtatagtctaagaagctgctatagtctaagaagtaggatgaatattccagttcacaggtggctgtggtaagggatgcccttataaatgtgcatacagatgaggtcatgtaaagactttacttggatggaatggtctcatacatgcttcctcctttctcttgaacaaacatatctatctcatgtctcattctcttaagggcaggggaggcaagataaagaaaagcattaatttaagtaatttgcagcaatccgtggctgaaaacagttcaaggtgctaccctttaggcagtggaattctaacaaagaaactatgaaagcaccaatccatccatccaccaactcaaagagctggagggcggtggcaggcagcgggggtggagggtgggcacgcggataccacaggtgatggcttcacctctctgggctcagtttattctgagtgacactgttggactagatggtctctaagtccctcctagtccgaaatttcaagattttttagtatttttttttctgaacaaggtgctttttgatagcacctgtcagctcaccttttccagggccagacatttgctgtagtgattcttcctggggtcggccttaatgacagtagctttctccaaccacagccatattccatgagcacctgtagtcctgctttgccacttctatgatcacatgggtgactccatgcaccccactgctgccacgtgcgtcaggtgcctgagtttctttctttgtgatggtgaggtgtcccaccaaagtgaccatattggactttcatcatcatgggagatgctggtaactggcatgcccaaatgttaaaatgccatcacttccactccaccactgaatcatcccagactctttcaaaagttatagagaacaaagccctttggttcagatcatttgcaactgagaatcagaagtaaaggaaagaggaagaggaggaggaagaagaggaggaaagagaggatgaggaagaagagcagatgattcttctttagaaaaactgaagaaactgcctgagtgaaacccatggtaggtgattgcacctaacaaaatccacccctgtgtggcatttgatggccaccaagtcaaaacactcaggtccctgtccactgctctcatgggaagctggccagccacactcctgtatgtggaggtcccatcggctttcctgctcatggaagaggcctaaccataagacagatttagatgtgcaactacacctgtgccaatgagatcctagaaaagtcatcctaccctgtcaatgtttttttttttttttttttgagacggagtctcactctgtcacccaggctggagtgcagtggcatgatctcggctcactgcaacctccgcctcccaggttcacgccattctcctgcctcagcctcccaagtagctgggactacaggcgccggccaccatgcctggctaatttgttgtattttttagtagagacggggtttcactgtattagccaggatggtctcaatctcctgacctcatgatctgcccgcctcggcctcccaaagtgctgggattacaggcatgagccactgtgcccagcctaccctctcattcttaggtacgatagacaaataaggtcgcaaaacgtatggagtgaaaaacaaagctaaacagacagtactatttctcatggaggaaacagaaagaatgcagaaggggatgggaaacactctcaacagcaggctgaaagatttgagaaaatgtcgcattctgaaccagaaaaagatgccataaaagccaattgaagaataagaaagaactttttttttttttgagacagagtcttgctttgttgcccaagctggagtgtagtggtgcaatcttggctcactgaaacctccgcctcccaggttcaagcgattttccttcctctgtctccagagtagacgagattacaggtgcccaccaccactcccggctaatttttgtttttttttagtggagacggggtttcgccatgttggccaggctggtctcgaacttctgacctcaagtgatctgcctgccttggcctcccaaagtgctgggattacaggcgtgagtcactgtgcccagccagaaagaactcttaagcagtaaaagtgtcattgccaaaagaaatcagaaaaaaccccgaaaatttaagtcaaagaaatatgccagcgggaaaaagaaaacagctcaaagattttgaagggtcaaagaaaaaactagagatgtagccgatcaatccagcaggtccaaggggtggttaacatgagtcctaagagacacagccagagaaaattgaggggaagagggatgatttcaaagaaataatagaaaaacattcctagagctataaaaaggacatgagtcttcagatgggtctcgcagtagaaaggaggaaacacacccttaggcagatctccatgaaacttcagaacaccaggaataaaaagatctttaaaatgtccagagagagattgcaagcctcctgcctaagaatgagggttaggctggcatcagcaatagtgggtgctaaaagacaatgaaatgacaccttctgagtttggaggggaaatacttttcaaggtgaaatttgatagttagcaaagctaccaattatgagcacaaaatgcagccaattcttgctactcatggtaggtacattctataaagttgccacaaacatagccaaatcctgaaccactcctcttagaggaaacacagggttaggctcccgggagcctatgtcaacctgtcaacacataaccctgctttatgtgtgcttctgtttgaagacaccttatttaataaatactgttgactctttaacactgagctggtgaccaacagcactgtaattcatacttacacagagcttttctgacacacatattttctccataaggcatatgactgccttcttgtgattaggaacactagatagcactacaattggaggccattttaaacagcagaatcatcaataaaaaacaaaaatgtgagcaacatggcagtaaacagaccacaggaaggactatttatagtatgagagctaaacaagaagggagagcatcaccttgttcaatgtcaactgggaacattcatgttgggcagctcagatgttgcacctctctctgcatgtccaagaatgacctcaaaagtgtgcagacactgattttcaggttacaaataagttttagtgagtaggagaatttgcaaatatggaatccacaaataagaattgactgttaaaacatctccaggcattcaagtggtcagaaacttttcctttcatagagtatctctgaaaaagttactcaaggatactcttcagccaaatgaagataaaatcaaaagaatggataagacaagatactggaaattgtggagccaactcacgagcccaataaaaagaaaatcccagttaaacatttgtgagattggatttattttttgccttgtgaacatactatttgtatttttgttcatttatttgagacagggtctcactctgttacccaggctggagcacaatggtgcaatctcagctcactgcagcctctgcctccgaagcttaagcgatcctcccacctcagccttccaagtagctaggactacaggtgtgtgccactacacgtggctaatttttaaatttcttatagagacagggttttgctgtgttgcccaggctagtcttgaactcctgggctcaagcaatcctcctgcctcagcctctcagagtgtggaattacaggtgtgaaccactgcacccggtctatttttatttttttaaaagcatcaggtaggcagcatgagaacacagactctgaggccagaacacctgagttgaaatcttagctctgctgcttaccagctctggtgatcttgggcaagttgtttaacccctctgtgcttcctttgttccacagagtaaggctattagtagcacctacctcataggcttgttggtaggactaaaggattttgtaacattcagaatggtgcatggcacatagtaataatgctatgcataagagttaattacataaatatataggtaatcttctaaaagaaaaagaaattaaagtaggtctgtaaccacccaagtaggagagcatgagactggagtttaacaccagcttaaggtgctattcatggtttctgggcccagccttggagggtcaccgactcagcaacgtgtctcccacctccctaaggagggctggcctacccctgcaactctctctttgcctacagggttatctcctcctttcccaggcagagggtaaaacccgcagagatgcccacagacctggcccacagacctgaagtccactgtagggtgaagagaagcttgttttgggatagtttatgactgactttgcctgggaggtggcacccaagagtcccgtttgctgaggaaccccaggtggctgggattaaagggccacacatctgtaaaatttcttgcaggagacataactctgaggactctctgatgccagggtgtcccctggcagccctgatgcccttcttctgataattcccagctccatccctgcatgtccaggcaaagtcagcccccagcgctggcctcagggcgggggcttcctcccaacagcacggctggcgagtcccgggaggtctgttttcagcttcccttctctctgtttccgtgggaaatgacctgtcctgtttctctctgtcttgtgctcccaggtaacttggaaggctgggagaatccctcatgtctttccattatgggagatgtccttctttattgcctacaacaggggttggcaaactttttctagaaagggccagatgggaaatcttttcggctttgagagccatttgatctctgttgccactgctcaaccccaattggattgcaaaaggggccgggagaacacataaatgaaagggtgtggctagattccaacacaactccatgcaatacagactgatgtcatggactttagagacccaggaaggggagggaggccagggataaaaaactacacattaggtacaatgtacactactcaggtgatgggtaccccaaaatctcagaatcaccattttgttataatagagcaaattatattataacgtacttatgatataatccatccatgtaacaaaaaaaaaaaacactcgtaccccaaaaggtattgaaattttttaaaaatttaggatcaacaaaatattttatatgttcagaacatggtaaggagtgataaaaagcaagtttcagaatagcacgtatagtaaatacatacatgtgatatgtaaaaagtatgtgcttacaactgtttggctcaatatgaaatgcatagacatgcctagagagatgtccttccaaatattgtcaataatcatctttaaaccaggtgaggtggctcatccctataatctcagcattttgcgagccgaaggcaggaggattgcttgaggccaggaattcaagaccagcctggtcaagagagaccctatctctacaaaaattaaaaataaacaaataaatacaaataatcatctctaaaaaacaaatcaaaaaataaaactttttgcaaatgggtggtgggctggatttgacctactggtcatggtttgccagctcctagcctgtgaggctaaagaatctcacgcctgtaatcccagcactttgggaggcggaggcgggtggatcatgaggtcaggagttcaagaccagcctgaccaacacggtgaaaccccttctctactgaaaatacaaaaattagccaggcatggtggcacacgcctgtagtctcagctacttgggaggctgaggcaggagaattgtttgaacctgggaggcagaggttgcagtgagccacgatcgcaccagtgcactccggcctgggcaacagagagagattctgtctcaaaaaataataataaaaaagctttatattgggggtccctgaaaagccacagggctccccttccattttccccatcagcttgcctgggcgcttcctaaagcccgtgccccaaggaaggcagctggcttttctgacttgcaggtcactgtggcctccaagtcttaaatgcgggtgagactggctggcctccattcccttctagtgccttggagcacactgctgctcattaaaactccagaatccctccctggaaatttgttcctttctgatgtgccgtttacacagctctcagcaactggcaccggttctgagaatattttatgactaccttttgctgggcaaatgccaaccctctgaagatgaagagaggggaagttctgttcattttgcttcacggagaagaaccatctcttgcccgatgactctggtgtcctcctgcattctggtacattcttcagtggcacgaataggaccattccatggctaacgccactcaccaaagcctccatcccctttcagatgggaaggaaactgggcatccagaatcttgttatgacacaggcgattccaaacgaaaagggcccctcaggttttattaatgtattttctggctgttagataaaacagcagtgttttggagtcaaagaaacatgaggcctcttcctagatgatagactatgttttgaagaatgagtttaggtctccctttagtttatccaatgaacaaggtatgaagttgtttttccctcacagcaaggtttcttcagaacaggatttgaaagtgcctgcaagtggctgagagagacctttctctgaggtgaagagcagatgaaacattcactaaacaggctgggtttcctgagtcttgaaggcaaacatgaaaagtctgtgaaggatgctttctaaagacacataagaaaggaggggaggagagtggggagaggacaggaagctgaggctgcagcgaggcaagagtttgcgtccccatcttgtgttcttttggattttttttttttgagacagggtcttcctctgtcacctagcctggtgcagtgttgcaatcttggctcactgcagccttgacctcttgggctcaagtgatccttccacctcagcctcccaagtagctgggactacaggcatgcgtcaccaccccacacccggctaatttgtgtgtgtgtgtgtgtgtgtgtgtagatacaatatatataatgtgtatatataaatttatgtatgtatatacatataaatatgtatatatacatgtatatacatataaatatgtatatatatactcacatatctatctatacatatatatgcatatagatacacacacacacaaacacacattttttttgtttgggtagagacagggtttcttcatgtttcttcttgttgcccaagctggtctcaaactcctgggctcgagcgatctgtccatctcagccccccacagtgctgagattacaggcatgagccaccacacccaggggacctcttttgatttttgaacacagtacctgggcaaactttttttaaatttaattttaaaatagaataaaattatgtcatttattcatctcttagaacttggcaaaatttcccactcagctgggtcacttggccgtgtacttgatcttccttcctcctttgccctggccaaggaggctccagtcctgacaatccccacagcccttgaggggtgccatagtggggactggtgcccccagcagatgaggtgggtgctcaccctggttctgagacactgcctggacctccagttactgtgggggctctcacgatattttcggaaacatttgagtcttctgacttattttttaaatggcttacatagcacacctagaggctgggagagtgccacagcaactagaggtatcggcagtgacaggtgagtgacggggagtctcagaacccagttcagagtctggactccaccgcatcctggtggtgcagactcaggcgaggaactcagggagtccgagcctcagcttgctcgcacgtaaagtgaggaaagttcacctactttgcagggtggtgaacacatgagcacatgtattagagctcccttcgtaaagtagttcattagcaatcaatgcaaacggcgatggctgccctgggagggaagcccccgaaggaaggagcaggccctcaaaggcccctccaaggtctcctgcctcactagtccgtccagggcctgtgtggtcaatggctggccagctcactccacctcctctcactcccaggccatcccagcatggggggacaaattccctccctctccccttcacaccgatgactggcaggccaagtgccccctccctttgccaacagcaccctggactgtttctcccaggtacccacctctctgcctttgcacatggatttggctactgatggaagccctgttactacaccaattgctggaccaggagggaaccaagctggaccacagggtctctgtcttggaaatttgaattttgagtgctgggacttgaagatggaaaacggtcccttctccttgtccctcgccttccacccaccccacacgtttcagtcactcaccgtccttttcccacccacaggcaagtctgggcccctcctctgagaatgcccccacttctctgggcagaagtgcccccccccaacctgatgcagccgcagtttgccttcttggggtgccagcagctctgacttcttaggtggccgatgccctgttgcgtcatgaagcactcactgacatgcgttgcttcttgtcagtctgcctgtctgtctcctgctctctctgtgctcagggaggaataggactgtgtcccaattgtctccctgtcccaacctttaggatatcatctggctcatggaccctaaaaactgtgttctgaaggagaagagtgtcatgagatggcccatttgctcacaggacagcagcgttacaaccccaagacgccatggcccccatccccaagcagggagtccccagatagtgttgtgaaggagtcaaccagttccggagatggaggctgagctactgtgaggtcagtggccccagctggagccaggctgcttagattgcagctggagagctggtggaggggagtaggagggacccgagtcttctgtagaaagaagcctcttgtcccggggagtcaggttccatgcattcctgatccaatgtccggtgctgggcgccagaggaaacagggatcctgggggtctgtcctcattctaagcccccagagcgaggggctgtaggaaaactcacagagttgctccctggggctctgtgccaatgtgggcaagaggcacatgttaccacttatcttgggataacttcaagggtcagaggagggacccagcctggctcccgtcaccttagcacatgagggtcctggggaaaccccgggggcagcttccaaatgtgcctccaagatgatgcctggatgcgggagcctgccctcagggccacagcccaaccctccaccctgcaggatgccctgagaggctccttcgcctccccagagccaggaggggctgggtgggtctggggggatcccttcaccctcctctcactccccagtgcttcggggcttgcagaggtccaggtgattccggcagaaactcaacctcagcaaactggagctcaaggaaacagaggggcttttgacctaattattcccaattgcttgtctccatcgatcacactctcttggtaattgcccaactccccactttggggtggggggtgtgtttctcagggggctgcattcgcgtgggataaatggggtgtggcgctgagaaacatgcaggccctcgctttccgcacactgtggcctttgtggaggagtgttttgtttactgccattaaaattcagagagcacgaccagggagcgtgcagggccgtgggagggacaagggctggctcctcagggagaggcctgggctgatgtaagctgagcgtgggcctggccccgggggagtccccaccatctgggcccagatcccacttacatggtcactggtgtttgcaaacccttgattctgtgcagaaacccatccgtggttccctttctgacgtccatctcagggccctggcctcctgggcccagcatccagggatcctccacactcccctagctccacacctcccacctcacctcacgctattcccccaaactgcttccctgctcattatttctgaaggtgaccctgagaacgagcacctcagcccttggcctgatctttgccggggccggtgtccccctgtggatgcagggctctctctggcctccaggggacccacgcctgcctcctcccctccgagctcctccagcaccaatggtctgcaccccctaattgtgtctggagggcatcggcttcccctcatttctgtacctgactccccagccagcctgaggactcccggggggactttaggccccagcactcaacgtcacgtcacactggggcagagctcagtgtgcatctgttggttgatgacattatcaggcagcaggtgcattccagtgccatctaccccacaggaatccattccctttgaacggccaggccaggcctccactgtcccctcccagcctgcccatgtggttccaatactgttgacactttgactcttgtgtggctcccaggctggtctatggagaggcttcagccagctgcaaccacaccactcctggtgtccgaatcctctgtcccaacaattgcatgcactattggctcaaaaaagcgttttgaatatcaaatgcaaactcaatgggttgggactcatgggaacattttcatcaaatgctggagaacttacggactcacctttccttttctccacctttctcctacattcaccaaaacattgaactgattggaggtcctggccatctcactcactaatggcaacccctcccaaatgagtgtctccattctggtatgtgagccagtgagcttcaatgaacctcataacttccatgtaataacatctatgttccctgaaagctctggtacttaaccaggggcaattttccctccaggggacatttggcaacatctggaaacatttttaattacacaatgggagggaggagtgctcctagaatttagtggggagaagccagggataaacatccgacaatgcacaggacaaccgctcacaagaaaaagtgatccagccccaaatgtcaataatgccaaggttgagaactgtgccctgaatgtattataaagtgtcttgtagaaggtagttctattttatttaacttgtgattcgacatcagcaattcttgcctgcccaggttggtcacccacaccgccagagggaaatgaagggctagaggggacttctaacttggaatggagacaaaaggcacaagactcccacagcaaatgacagtaaaggggtgcctggaggtccggtgcatttctgggagccagtccgaagggagacctcccttttaaattccaagcactcagtcaatccaactcacaggaaggctccagatgaaaggccgatgagagatgtggaaagagagcacttttgtttctaagcttacagagaagggtggagaattttttaactgagccaaaccacacacacctctattggggcatgaaaaatttgcgcatcaacaagacacaatcatgcaagtgacacggcttttcatgcgagtcacccacgtggctcaccaaatcaaatgtgaaagcttatttgttttgtggaaattctcaaataatggctctgcctgttgcagcaggtaaaacttacagttgaattgtgatagagttttttcaacacaggatttttctgtttgacaatatttgaacagatggtatgtggggcagcacaggaaggtgcccaacagtttccaccctgagacccggatcccagtgtcttccatggttggccagtgtgtactatatatagaacttggagtgctcaaaatcttgctttctgcatgacttgtactcaactggtcttattccatttacttttccctgcatattttcccctggcattttattgattctatcaggattactttcagctgcaaataatggcaaacccaactaagagtggcttaagcagtgaagacaatgacttaattatcattatagtcacataacaacagtcagaaaattccagggttgctgtcgtgtggctcagtgatgtcatggaaggagctttttctgcttggctagtcacagtaagttagattttcatctttaaactcatgacctcatgatcagaagatgtctctaaagctgtagatgcaacaacatttcaaacaggaacacatagggtgacgagccaactccctttgcccaaggctgaggggttactagaaagtcccaagttaactgggacaagttggttaccctatggccaccttttgttagggaagaacatcttccccagaaattccagcatgttctccttggtctgttgatccagaactaggtcatatcctcaccactagaccaatgactggcaaggaggcccaggatccccctgctgtgattcatcccctggggctagagaagaccctcccctgggcttgcccaacactgaaacagaatggagattctattggccaggaagaaggtgaggaacccagacattcgccagagtgctcatgaaaacaattaatttcccagttagccaaatcttaccaaccaagcagattgtgtgtgttagacacattattcattcatttattccttattatttattccttgaacaaatatatgtgcaagctctagcctgggccaagtgggtctagggggacctcccccaccccagttcactcctcccacactgtggggcctacagagctccaggtgattctggcagaaactcgaccatggccaactggtgctccaggaaacagagggacctttgacctaattattcccaattgcttgtctccatcaatcacattctcttgataattgcccagctccccactctgttcttcagtttttttgtcaataaaaaggagaatattatacctatttcataggattgttgaagaattaagtaacttaatacaagtaaagttcacagagtttgcctggcacatgggaaacattcaatcaatgttagctattactataacacttgtggtagtttttcaaatgggttaaaaatccttttgcacttctttcttttcaggtgggggggatggaggggagagtaaatctatgttcctgtcccttgaatctgtgtggactctaactgccttgaccactgggatataggaatgtgactttgaggctgggtcataaaagggcatacctctccttccttgtttatgggaacacttgctcttggagtgctaccctgagacctccatactgggcaagtaagatggagcattctgctccacagtcctagctgagcccagccttctagctatccccatcaaggtgccagacatcacagtccctccagcctaaccaactggtaccagcaatgacctccatccatcaacaccatgtgcaacagaagaattgcccaactgagcccttcccaaattcacagcacaaaattgggggctataataaaatgattgttgttttaaggtatgaattgttggagttgtttgttacacagcaacagataactgagacactactcctacagttgcttattattactactattatgattattcttattagtattaaaagactgtgccacttgaatcttgccctaactatttctggctaataaactgccctttaagaagctacagaaatattccttatgaactgttgctccaggacttgtccaggaaaatgactcatcttatgtgatctggccccaaagaacatatcaagctcagtgtacaataaacactagcaagccaatatttgtcttttaaaactctgaaaagttcaaagccaaaccaaatgtcaaactaacaagcatgcctcccatttttaaataaaaaatataaaacctaaattcctgatttcccctgaatatagcagacgtgcctgggagagcctgattcctgtaacacaccagccaaggaggaaagacgctaatggtcttgtgttctttctacctgtcaaagtgaaggaaaacaacacattgcttttaaacaatatttatgtaacactccccagaagctgtacctgctgaagtaaactataacctttctctctttaaacaccttttacttgttattcaaataggaagttattctttcagaattagctacatctgtcaacctagcattcctgactgccacatagaacgttcttaccatatcccatctcctcaataactttctctcaagcttaatttccccctaggtttcatttatttttgtgaactccctggggcttcctgacaaaagaaacctttaggactgtaggtaacggtaggtaacatggtctgcacgtttagggctatattttcttttattagatttttcaactcagagtaagacagtgggacaaatccacgctgaaggcaattaggtttttattaatggttccacagacccgacgtttgttataagccttaatgcaccaactttcttgtctccttcatgggtttaaaaggtgtccagtgtgttctcagatgtgtttttgttggatgggcatgggctatagctctttggcaggaaagcgtgggttgagtagacgaaaatgtactggattctatctgcaaaattccaagcactcacttccattgtttccttatgtgccatgcatttatcaggatgaaaccatcccctttccttcactgatcattgtttataaccgcttatccatggatgggtgttccagctttcggccttgcctgaaaaacatgcagatgattgcaatctgcattctacctgtaactaatcccatccacagcctctcccatctgccacggactctcctccctgcgacttttagtgatacagagtgaggttagtcctggctactctccagcagaatttcacacataaggcaagggccaagcagagatgtcccttacccacccaagagaacatgacagagagggccacagtgggactctggtggagggtagtttaaggaagaggagggggcttcgttttcaagagaatgaattcgaccgatctggcccgagaatgcattcctggctgcacctgtgaggtgttcgatgaacaaactggctttgggttttcctggatgtcgtctgatctgagtggaatccagagaggtgcaatcagggtcttggaagactgaaagcaaatggtggattggatgggttcatcttcactctgctttttcatctttttcaaatttgcaaactgctctttgcatgccacacagacacaaccatcactaggtcctctgctgaacacctatggcggtccaggtcccacccagcaggcttcctgtcagattttccagatttagcttcaaaataggtcgtatttattatgccctgcctagttccagaaagggttggaggcagctaacttaaaaacataattatgaaaagctgattcggcttcttatttggttaaagatgttttgctgtaaatgtgaaaaaatattttaaatcctcttttttattttagagtgatctttgaagatgattaccttattttacaaacagacgtttctaataattgaataccattaaatatctgtccaaaaatttccttttgacctcaaaattacaactaatatatagtgtttttgtttcttcctaacgacaaggaaatctgatgtcattgtgtaaatgatgcagaagaaatgttttgcatgggcaaaagtgcactatctcaaggatttggataaacttttatgtcattgtccttgtctgtggcacagtgtggggcgggggagggggtcctctgctctgatccaccccaacacccgaatggtcttagtattttatattatattatattatattatattatttcattcaacattgaggcacactgccttttaattttttccttctgtggaccacttgaactctcgatttcccatggtttattaaaatacccaaatgtcattcttttacttcgattttataaataaacctttggctgtatctgtcagggagggctgaatttactaattctcaggccaaaccaggctgtgctgggactcagtggcagttcgtggccatgcaggcaattctgctggcctggttgttgctgccgtttcctgacgtgccctctgttccctgcccaaacaaccctcagcgttggacagatgagagaaaggagaagataaatgctctcccgtctggtgtggagataatgcctgaccactcatcctccttcctgcttttattccgggtgtagatggtgagcctgcccatggcccagtctttcacatggagcagcagggcgttctctccagtgggaagtagctcatgtcagtttcaatcatttccattccgggcattttgcagaccttggcttcttcttgagaaaggtgagcagagatatccagtgcctcgaggagcccaaaatgcatgatcctggtgcctgtcacagagatatccagtgcctccaggagcccaaaatgcatgatcctggtgcctgtcccaggtcttccctcctgggtagaatcttctgacccgaatgtggggaagcacaatgacccctaatcgcaaaggaatgttggaggatcatgctgtgcactcactgcggagatgcatgtttggattacgtgttctcatttagcagccgcccgtttgacaggacatactgcacgccagccctcttgttgacttagttcctgtactggcaaagccaaataaactgagtttgaggaagagtgtgattcggggggagagggctgattggtgaggacagattggcggtgaaggggaattgagtagagccgtggctgcagctgtgaaagaggtgggtgcacccaagttcaaccgcatgtgggctgcccacaagactacaggagcctgggttctggaggcgctctatgtccccaggtcgaggggcttaatttactgttgtgttttgtttgtgtaacaaaatatgtaatagtacctcataaaacaaaacagaaaaaggaatgaaatcatagggtggtgacttctttctaaaaaggactccccatgtttggagctctgggggcagggcattgtgctaagcgactttaacacatggatatctctgtgcgggtgacttagtctgtttgtgctgctataacaaaatgccacagatgatgcaatttataaacaatggaaatttgttgctcaagttctgtaggctaagaaactcaagatcaagatgggctgggcgtggtgtctcatgcctgtaatcccagcattttgggaggctgtggcaggaggaacacttgagcccaggagtttgaaaccagcctgggcaacacagtgagaccccatctctaaaaaaaaaatgttttttaattcactgggcatagtggcatgcacctgtagtcccaggtactcagtgggctgaggtggaagaattgcttgagcctgggaagttgagaccacagtgagctgtatttgtaccactgcattccagcctgggtgacaaagtgagaccttgtctcaaaaaataaaaataaaaaagatcaaggtggaagcagattctgtgtcttgtgatggcccattccttgtagatggtgacttctgtatgtcctcgcatggcagaagaggtgaacaatcttcctcagatccccctttataagcttgctgctgtggtttgaatgtctccccaagttcatgtgttggaaacaatccttaatgcaacagtaatgagaaatgaaaactttaagaggtgattaggttataaggactctaccctcatgctcatgaatgatttcacattattatccagggaatgggttcattatcaagagactggatttgttataaaagcaagttcatccctctcttgttccctctcttacttcatctatgggatgatgcagtgagaaagccctcaccagaggtagtgccttggtcttggacttctcagcctccagaaccatgagccaataaatttctgttctgtgtaaattatccagtctcaactattctgttacagcagcatagaacagactaagatgtccctaatccccttcttaaggactctgcttttatgacctaattacctcctaaaggctccacctgttagtactattgcattgaggactaggtttcaacttataaattttagggtgacacaaacatacagaccatagcattctgccccagcccccctaaattcatgtcattttcacatgcaaaatacattagttccatctcaatagccccaaaagtcttcacttattctagcatcaaccaaaaatttaaagtccaaagtctcatctaaatttcatctaaatcagatatggtgagactcaaagtaggattcatcctgaagcaaattgctgtccagctataagcctgtgaaatcaagcaagttatgtgcacccagatacaatattggggcaggcagaagacagacattcccattcccaaagggaaaaatgggaagggagaaaggggcaataggactcaagtaagtccaaacaatgctaaatcttcatgcttgagactaacctccgctgactgcatgtcctaccttctggacacactggggtgggatttgaggtcacaaggctttggggtggctttgcccccaaagcttcactggaccgagcccacactgtagttctcccaggttggagtctcatgcctgtggctctcccagactggaattgcatgttgatggtttcactagtctggagtctagaaggctgccccattctcacgactcccactaggcattgccctagtgaaggctctctgcagtgggcttgccctgcaggtgcccctctgagttcattgcatgccagagactgcaggcggttccatcttttgaaatctaggtggcgccagccacacccccacagctcatgcactccgcagcctggtggatgtgaaggtttactgcctgtgctctctgaaatcagaagattccaaaccccctgtgccaggcagtattattgtgctaaggtggactggaagatctactggctcttacctttggttggattatttgctagggggcctcttgcttctccagactactaacctcctggctcaagcacccacaggcttcaccaatgcccaaccccatctaagtcctggagtgagcaggcttaggtgcttgctgtcgctgtggccaaagcataccttggctacagtgctggatagcacagatacagataaacaaataccaggccaatttgttctcttgctttttattaggagaagaaaggaagtcctttctccatctggacataaagaacttatggagaaagactgggctgaccatgagtggtagaacaaaaataaggcagaagaacaggaaaaaaaaaaacaagaaggagaagcacagaaaaataaataagatgcagagtgatctgtttattgggttggtttctgtgtaagcacacagctgagtggttaatacccagaaccctgtgaatttccctcgactgtggtggggaggagagcactgtggtcatctctttctcatctgagggaactgaggcccagaacacaagcccagctcacagctaaaaagtcatgatcacaggatgcaaaccctgtctttgtgggactgcacagccagtgccttgagtactctgcaattttaccccaaagtttcagtagtgtgccttggggatcaattgtgtttgagccaaggtggaaatttttctgctggaaaaagttatgagtaagctaccacggatccaaaagtaatttgctttgcatggttttcaccccaatattaattggaaaaataaagcagggaactctccttgttgcaacaagaggccaggaagccaacacatcattcataagcaacattaggtgtttccttgggggaaaaacactttttttttcagaatggaaatatctttattgctgtcttgcttaaagaagtacctgttcacctcctgtccaagaaggccgaataggaacagctccagtctacagctcccagcatgagcgacacagaagacaggtgatttctgcatttccaactgaggtaccgggttcatctcactggggattgtcggacagtgggtgcaggacagtgggtgcagtgtaccaagtgtgagccaaagcagggtgaggtatcgcctcacccgggaagtgcaaggggtcagggaattcattttcctagccaagggaagggggaacaaatggcacctggaaaatcgggtcactcctaccctaatactgtgcttttccgacagtcttagcaaacggcacaccaggagattatatcccacgcctggctcagagggtcctacacccacggacccttgctcattgctagcacagcagtctgagatcaaactgcaacacggcagcgaggctggagtggggggggcgcccgccattgctgaagcttgagtaggtaaacaaagcggcccggaagctcgaactgggtagcccaccacagctccaggaggcctgcctgcctctgtagactccacctctgggggcagggcatagccgaacaaaaggcagtagaaacctctgaagacttaaatgtccctgtctgacagcttggaagagagtagtggttctcccagcatgcagcttgagatctgagaatggacagactgcctcctcaagtgggtccctgacccccgagtagcctaactgggaggcaccccccagtaggggcagactgacaactcacatggccaagtacccctctgagacgaaacttccagaggaacgattaggcagcaacatttgctgttcaccaatattcgctgttctgtagcctctgctgctgatactcaggcaaacagggtctggagtggacctccagcaaattccaacagacctgcagctgagggtcctgactgttagaaggaaaactaacaaacaaaaaggacatccacaccaaaccccatctgtagtcaccatcatcaaagaccaaaggtagataaaaccacaaagatgggaaaaaaacagagcagaaaaactgaaaattctgaaaaccggagcttctctcctcctccaaaggaacgcagctcctcaccagcaacggaacaaagctggagggagaatgactttgacaagttgagagaagagggctacagatgatcaaaattctctgagctaaaggaggaagtttgaacccaatgcaaataagttaaaaaccttgaaaaaagattagacaaatggctaactagaataaccaatgcagagaagtccttaaaggacccgatggagctgaaaaccatggcatgagaactacgtgacgaatgcacaagcttcagtagccgatttgatcaactggaagacagggcatcagtgacggaagatcaaatgaatgaaatgaagcaagaagagaagttaagagaaaaaagagtaaaatgaacaaagcctccaagaaatatgggactatgtgaaaagaccaaatctacgtctgatcagtgtacctgaaagtgacggggagaatggaaccaagttggaaaacactctgcaggatattatccaggagaacttccccaacctatcaaggcaggccaacattcaaattcaggaaatacagacgtcacaaagatattcctcgagaagagcaactccaagacacataattgtcagattcaccaaagttgaaatgaaggaaaaaatgttaagggcagccagagagaaaggtcgggttacccacaaagggaagcccatcagactaacagctgatctctcggtagaaactctacaagccagaagagagtgggggcaaatattcaacattcttaaagaaaagaattttcaacccagaatttcatatccagccaaactaagctttataagtgaaggagaaataaaatactttacagacaagcaaatgctgagagattttgtcaccaccaggcctgccctacaagagctcctgaaggaagcactaaacatggaaaggaacaaccagtaccagccactgcaaaaacatgccaaattgtaaagaccatcaaggctaggaagaaactgcatcaactaacaagcaaaataaccagctaacatcataatgacaggatcaaattcacacataacaatattaaccttaaatgtaaatgggctaaatgctccaattaaaagacacagactgacaaattggataaagagtcaagaccgatcagtgtgctgtattcaggaaacccatctcacatgcagagacacacataggctcaaaataaagggatggaggaagccctaccaagcaaatggaaaacaaaaaaaaggaaagggttacaatcttagtctctgataaaacagactttaaaccaacaaagatcaaaagagacaaagaaggttattacataatggtaaagggatcaattcaacaagaagagctaactatcttaaatatatatgctcccaatctgggagcacccagattcataaagcaagtccttagagacctacaaagagacttagactcccacacaataataatgggagactttaacaccccactgtcaacattagacagatcaacgagacagaaagttaacaaggatatccaggaattgaactcagctctgcgccaagcagacctaatagacatctacagaactctccaccccaaatcaacagaatatacattcttctcagcaccacaccgcacttactccaaaattgaccacacagttggaagtaaagcactcctcagcaaatgtaaaagaacagaaattataacacactgtctctcagactacagtgcaatcaaactagaactcaggatcaagaaactcactcaaaactgctcaactacatggaaactgaacaatctgctcctgaatgactactgggtacataatgaaatgaaggcagaaataaagatgttctttgaaatcaatgagaacaaagacacaacataccagaatctctgggacacatttaaagcagtgtgtagagggaaatttatagcactaaatgccctcaagagaaagtaggaaagatctaaaattgacaccctaacatcacaattaaaagaactagagaagcaagagcaaacacattcaaaagctggcagaagggaagaaataattaagatcagagcagaactgaaggagatagagaaacaaaaaacccttcaaaaaatcaatgaatccaggagctggttttttgaaaagatcaacaaaattgatagaccgctagcaagactaataaagaagaaaagagagaagaatcaaatagacgcaataaaaaatgataaaggggatatcaccaccaatcccacagaaatacaaactaccatcagagaatactataaacacctctacgcaaataaactagaaaatctagaagaaatggataaattcctcgacacatacactctcccaagactaaaccaggaagaagttgaatctctgactagaccaataacaggctctgaaattgaggcaataattaatagcttaccaaccaaaaaaagtccaggaccagaaagattcacagccgaattctaccagaggtacaaagaggagctggtaccattccttctgaaagtattccaatcaaatagaaaaagagggaatcctccctaactcattttatgaggccagcatcatcctgataccaaaacctggcagaggcacaacaaaaaaaagagaattttagaccaatatccccgatgaacatcgatgcaaaaatcctcaataaaatactggcaaaccgaatccagcagcacatcaaaaggcttatccaccatgatcaagtgggcttcatccctggaatgcaaggctggttcaacatacacaaatcaataaatgtaatccagcatataaacagaaccaatgacaaaaaccacatgattatctcagtagatgcagaaaaggcctttgacaaaattcaacagcccttcatgctaaaaactctcaataaattaggtattgatgggacatatctcaaaataataagagctatttatgacaaacccacagccaatatcatactgaatggacaaaaactggaagcattccctttgaaaactggcacaagacagggatgccctctttccccactcctattccacatagtgttggaagttctggccagggcaatcaggcaggagaaagaaaaaaagggtattcaattaggaaaagaggaagtcaattgtccctgtttgcagatgacatgattgtatatctggaaaaccccatcgtctcagcccaaagtctccttaagctgataagcaacttcagcaaagtctcaggatataaaattaatgtacaaaaatcacaagcattcttatacacttataacagacaaacagagagccaaatcatgagtgaactcccattcacaattgcttcaaagagaataaaatacctaggaatccaacttacaagggatgtgaaggacctcttcaaggagaactacaaaccaatgctcattgaaataaaagaggatacaaacaaatggaagaacattccatgctcatggataggaagaatcaatatcgtgaaaatggccatactgcccaaggtaatttatagattcaatgccatgcccatcaagctaccaatggctttcttcacagaattggaaaaaactactttaaagttcatatggaaccaaaaaagagcccgcattgccaagtcaatcctgagccaaaagaacaaagctggaggcatcacgctacctgacttcaaactatactacaaggctacagtaaccaaaacagcatggtactggtaccaaaacagagatatagaccaatggaacagaacagagccctcagaaataatgccgcatgtctacaactatctgatctttgacaaacctgacaaaaacaagaaatggggaaaggattccacatttaacaaaaggtgctgggaaaactggctagccatatgaagaaagctaaaactggatcccttccttacaccttatacaaaaattaattcaagatggactaaagacttaaatgttagacctaaaactataaaaaccctagaaggaaacctaggcaataccattcaggacataggcatgggcaaggacttcatgtctaaaacaccaaaagcaatggcaacaaaagccaaaattgacaaattaaactaaagagcttctgcacagcaaaagaaactaccatcagagtgaacaggcaacctacagaatgggagaaaaattttcaatctactcttctgacaaagggctaatatccagaatctacaatgaactcaaacaaatttacaagaaaaaaacaaacaaccccatcaaaaagtgggcaaaggatatgagcagacacttctcaagacatttatgtagccaacagacacatgaaaaaatgctcatcatcactggccatcagagaaatgcaaatcaaaaccacaatgagataccatcttacaccagttagaatggcaatcattaaaaagtcaggaaacaacaggtgctggagaggatatggagaaataggaacacttttacactgttggtgggactgtaaactggttcaaccattgtggaagacagtgtggcgattcctcagggatctagaactagaaataccatttgacccagccatcccattactgggtatatacccaaaggactataaatcatgctgctgtaaagacacatgcacacgtatgtttattgcagcactattcacaatagcaaagacttggaacgaacttggaaccaacccaaatgtccaacaatgatagactggcttaagaaaatgtggcacatatacaccgtggaatactatgcagccataaaaaatgatgagttcatgtccttgtagggacatggatgaagctggaaaccatcattctcagcaaactatctcaaggacaaaaaaccaaacatcacatgttctcattcataggtgggaattgaacaatgagaacacttggacacaggaagggggacatcacgcactggggcctgttgtggggtggggggaggggggagggatagcattaggagatatacctaatgtaaatgacgaattaatgggtgcagcacaccaacatggcacatgtatacatatgcaacaaacctgcacgttgtgcacatgtaccctagaactaaagtataataataaaaaaagaagtactggttcattataaaatatcaaaaagcataaatgtataaaggctcatctcccttttcttcagttcctctccctgctctgcaagaatggacttccaaggctgtagatggactatagatggttttatataataagaaagaagaatccacaatatgggcaccattgtgtatgaagatgtctttccaaggtaatacactccgtgcagagcttgcttttttggaactgtgagagcttcattgatgaatggactcttaacaattccccactgacagggatacgacgtcatgatattacaaacaaccctgccatgagcatttcctgaatccttgtgcatctttacccatcttgaagtatttcctcaggacagatttatagggcagggatgtattttttttttacattttttcattttttaaaaatatttttagagacagggtctctctctgtcacccaggctggagtgcagtggtgagattatagctcattgcatccttgaactcctggcttcaagtgacactcctgcctcagcctctcaagtagctggaattacaggtgtgcaccaccatgcccagcaaatttgcttttttttttttttatagagatgcggtctcaccatgttgcccagtctggtcttgaattcctggccttaagcaatcctcccatctctgcttcccaaagtgctgggattacaggcacgagctactgtgcccaggctacagggcagtttttaaaagccctagtgtctctaagcgtgttatgctgggccacatcccccaaaggtaaacacccacatcacagtcacaacacaacccacattcctggctttgttgtgcttgccattgcagatccccaagcctccttggagcatccccactaaattctattcatggggggcaggacgcaggcctttaagccaccctgcagcatcctccacttactttttttaccttccctgtactgattgtatgagatgccaaggccctgttccctctctcggctgacaatggtcctcacccacattcagcaaacctgggctggggttggggtagtcaggaccttgacaatttccatgccagggacccagatcccatctctggagccacaagcctctgagctgtcagatgaatggcaaagtcgttccttgactccatcatacacaatccaaactcaatattccctggactccttccgtctctgtcctacaagattccagaatccccataccaggacagtattattatactaagttggaatggaagatctactggctcttatctttggatgggttttttcctaggtggcctcttaggcgtccagactactaaacatctggctcaagcacccacaggtttcacaaatgcccaaacccacccaagtcctagagtgagcggcttaggttcttgttctgctcacaccacagattgttggatctccatgtgtagggggtgaagggggcaactcggagattttgaagggagaagtgtcacgagcatcttcgtgggcaggaggaagatgaggatgtgaaaattagaagagacaacctggggatgggggagacacattcaagaatgctagaatatcagagctgactaatacactgagcttgcagtgtattagtcagtgttgctgcagcaacaaacagccccagattttcagtggccacaacagcaaacacacctttctcactatattactggggccccggctgttgctctgctccatgcatcttctcattctgggacccaaactcaagaagcagtcatgtgggtctcaaggcagagaaaaagagcaagagggctggcaggagatcccactgtacttcttagatagagcttgtgcaagcacctggcttaactcttatttgctcacatttcagtggctaaagcatgtcccctggctaagctcaaagtcaagggacagagatgtataatcctttaacagggaagagggtgtgaagaattgttaataccaactctaactaccacagatggcacaaccctaactctgttatatgccgggagaaagtgaggcacagaaaggggaagtggcttgcccaaggtccacaaaccaggtagcagcagaaccagctctagcaccaaatttcctggcaaccaatccaatgttcttaatcctactcccaaaatttcttccaagagatattaactgatatggcttgactctgtccccacccaaatctcatgttgaattgtaatccccagtgttggagatggggcctggtgggaggtgattggatcatgggggtggatccttcataaatggtttcgcaccatcctcccccagtgctgtcttgtgatagagttccaatgagatctggttgtttgaaagtgtgtggcatgttcccattggttctcttgctcctgctcccaccatgtaagacatacccgcttcccttttgtcttccatcatgactgtaagcttcctgaggcttccacagccatacttcctgtacagcctgcagaacagtgagccaattaaacctcttttctttataaattactcagtctcagccatttctttatagcaatgggacaatggactaatacattaaccaactgcggaatgggcagggaggtctttgttataagacagctcagagcctttaatatgccattgaggggttgggtgcaatggttcatgcctgtaaccccaacactttgggaggccaaggcgggtggatcatctgaggccaggagttcgagaccagcctagccaacatggcgaaaccccatctctactaaaaatacaaaaattagccaggcgaggtggtacacctgtcatcccagcttcccgagaggctgaggcaggagaattgcttgaacatgggaagtggaggttgcagtgagccgagatcgcaccactgcactccagcctgggtgacaagagtaaaattccatctcaaaaaaacaaacaaaaaaatacgtcattgagatttatcatctccaggtcaggaaagtgggcttcagcttttcccaactttttttttttaatcacaaaatccacagaaccatctgaggagcagcatgtggggttggtgttcccaggaacacactttgggaaacacagcagcaccacaccagcaagtcagatggacttactgcaccacaggcaacatgagactcaagttttaggttgctataaggaatgttttaaaataacataaccttcatataaattcttcacagcttagaaatagacacagctttcatttttagaaagttcccattactttgtaaggccatcattaattttgattattttttccatttttatttctttttagttgcagctgaaaatgtaataaatgtaatgaaacagatattcataaagtcattggtggatgaatcatggggatctggataatgtttttgtctatgacagcctttatttctttaataaaaacaacaaatatcacaaatcacttctcaacaataaaaatatgttttcacaaagcaaaaacctacgttttgctgtgaaaatggcagcacatctgtcattctcaacacatcttaaacagtcgtacatggcgtgtggttggggccatgggactcttctgaaaaaggctacaagaattaggtcatctcaaatcattagggtatttttttccatgatgattattttgagttgtaacatatgttaaattaaaataaactttatatggctttggatttccccaaatctttcaaaaagtaaaatcctattcaaatggctcaaaaataatactgtaaaatatactccagtccccctttaagagttttctgatatactggaatagacttagaaactgtggccagaagggtcggctctttttgcccgcttcttaggcaggtgtttccacagatcacaagcttctggttaaaagaggcctgaagaccactgacctgctccctgtgggcctgagtcctctcctcttcgtccctccaggtcaccacacaggccctggggacaggtacagctcacagctaggaagtcatgatcccaggattcaaaccccatctttgtgtaactgcacagccagtgccctaatactctccagttttacccgagagtttcagtggcaaggcttgggcctcaattgtgtttccaccaaggtggaaaattttctgctggaaacagttatgagtacagttaagagtcccccacctgaccacgtgggacaggtcaggtgatacaaagttgtcctttatgtgggaccaaaatgtacttcccttcagtctctgttgagggaggaggaatgagtctaattcctgtatcctgtgactgtcccttcaaatatttcaagactgtcatcttcctccccagtcttctcttccacagaccaaacaaccttcagctcctatgcggcacctggcatgaatgcttctgaggctctgcagctgctggaggcggacattggcctaaaggagcccatgagtccatgatgccaagactgggcagggacacccaagagctgtttctactctaggaaatggggtgagtggaggacaggggtgtcagagcctcatggggcagcagggcctgtctccctcattgccttgattgtgccctatgactgtgtccccatactgccatggagatgggacaggaccctagcccaacctctgtgtctctgtggcctttctacccagtgccaaaccagatgatgtgtttaaatatgtagatgaccagcataatggagacatgtcctgagttatatacgtaaaaccctgcaacataatgagaaatacatgttcgtcattgtaactgtggagaatgtggggccgtttgttcctgcggtaatgctgactaatacaccaactaagattcctcccagaaatatgtgcagccacccacggcttaacaatggggatgtgatctgagaaacttgtcattaggaaatttcatcattgttcaaacatcatggagtgacttacaccaacctagatggtgtaggctactacacacctaggttacatggtagagcattttgctcctaggctacaaacctgtgcagcatgctactgtactgaatactgcagacaactgtagcacaatggtaagcatctgtgtatctcaacctagaaaaggtacagaaaaaatacagtattataatattatgggatcaccatcatatatgcggtccattgttggccaaaccattgttatgtggcaaaaggctgtacatatataaaatgtgtgtgtagatacacacacacacacacacacagagcattttgataagacacatagatttgcatataatttctattatcgttccagaatgaagtggtttgccatttttattagtagtttactctaaactaaatccaacatttcagtttgtttttctgatcagattgaaaatatatttaaaatattataaatcttttagacttgtcaaaagaaaagtgcagtgaaattcgtttcaccagatcacgaacatcttcaaataaccctggggctctttttcttctcagcattctcttccctatcccatccaatcctgcttctacggcaggtaagagaaaggataaaaacaggttgaggaaagggttcagtctgtcattcatttacgtctggggctgccaggaaagctggctggttttccttctgctctgtgagctgagaggcctggcgttcccacactccacacctgaatgagccaggggggcctccgctaattgcctgggtccctcgcctcctggcctcgttggtgaacagtaagccattgttttgtaagggagaaaaataaccttttaatgaatgcgtgcacatcgccccagccccctacccagcatcctgtgcccagggtttcatcctagaagacactccagggaacgaagtgcaatggtgccaggtggccccacagagcctcctcactcctgcaggcatccatctgaaattggacttcatgggccaggacttcaaggtgaactaaaagtaacaagcaaaagccacttgcctcttctctgcttgaggggaagtcgaccatagagtcaattcgtcccttcgctgatttactggctatcacaacaaacaccctgaaatacattccggaatattatcattgccgcagcatctgctctgctctgccagcaaacacgactccccaaagccacgccagggcgtcacctactctcctacctctgcacatccattatatttttgtaacggcaaagggtgcaaaaagcaaacagtgtgagctgggcgcatgtttttctaacagggcagtaagaaaatacttgctacctgagatatttctgtaagtcagtgaagcacgccattcaacatgtgggttgcattatcctctgagttgagcctggctttctaactcacactaaacaggcgtctgccagggctgagtttaataaaaactgcaactttcgctagttaatgcatataggcaataaagattcaggcatcccgagtgcttaagaacaggctaattgctgtgcactctgtccctaaatgagggttgtccccaaaaaacagcagagagacaatgaccctgtgagcatccactaggaccagcctgtgatgcaagcttttgaagcatccacacgtgatgtgcgtcaagcttctgaagctacgctcctgaggaaggctttgtgcagctcagacttccccaccatctgctaaccatgccctgcgatggtttccatcctaagtggatttatgttccatcccttcatgatgcttgcctacaaggaaggctgtattatttggaatgtattatttgggtcctggactgtattatttgggtcctagagttttttcaacatgttcatgttgatggttatgtcctttgatttcactgaggtcattacaagaagcgtctagatgaagatgattaagaagcttctgcattggaactgacgtcgtttcgttatcaagggtgcccctcgttttgtcacccagggagcccagtagatggtccaacaaaaaaaaaatttttaacataatgccaggagagaaatgcccttaaaaatgattaagtggccaggcgcggtggctcatgcctgtaatcccagcactttggaaggccgaggtgggtggtcaggaggtcaggagatcgagaccatcctggctaacacggggaaaccccttctctaactaaaaacacaaaaaattagccgggcatggtagcgggcacctgcagttccagctactcgggaggctgaggcaggagaatggcatgaactccgggaggcagagcttgcagtgagcggagatcgcgccactgcactccagcctgggtgacagagcgagactccatctcaaaaaaaaaaaaaaaagaaaaagaaaaagaaagaaagaaagcagcaacttccccactcaatcttgggaaatgaggggacaggtagccctattttctgtaagaaatagtttctgggccaggcaccttggctctcacctgtaattctagcacttaggaaggctgaggcgggaagatgacttgagcccaggagtttgagatcagcctgggcaacatagtgagaccgtgtctctataaaaaaatttgaaacttagccaggtgtggtagcatgagcctatgatcccagccactccagaggctgaaatgggaggatcacttgaggccaggagttggaggctgcagtgagctatgatcatgccactgcactccagcatggatgacaaaaaaaaaaaaaaaaaagaaagaaaataagaatacattctcactcacccctcctccagaatatatatttttttaaattcctagttagaaactccaagctgtcactgatttaaaagaaaaacagttgctgggagatacacagcttgctaaagcagaagtctttcaaaatgtcactaaaatatgagagtttcctctagttatttggtttccgccaaatagctaacctattgccagctgcacacaggagttagaaaaaggttacaattcatcccacccgatttgagatttttccagttaaagacatggcgaggtagaaagaccaagtcccttgtgatgttagatggtcctggggtaccattggactggccgagtctaatccctgctccgcccttagtagctctacagccatggggatggagcttatcctcttggcccccctttccttatctttgaaaccagagatatgtcttagatgatctcaatgtctcccctttttctgaagcctattacaaccttgtggaaccaaccattcctagggtcgcatgagctcgcctttcctaaggggaatattgaaaagcatccaccagggggcgcctgatccgcttcaggcggtggcaccggactggattaaccctgcagacaggtgaggtgaccccagctttcccatccagccctggaaggattccggatgtccggggatgtgacagcctcccagggattaggctagaatcacaccatctccgctaccaacctgttttgcaatttattgacgcctctgagcagctggtctggatgactctattttcggaaatttctggcgtttggggccagctgtctatgggggaaacatcttttcagtacgctcacgtatatgattcagttgcaggcaagaatctgggagctgctggaagctggggggaaaagtctctgactcttgccttcaacccctggccactgagaagtgggactgcagctagtatggcccccatagctattgaaatgcccgagacacgtcagtgtctaaacatctctcagaccaccccttccacttggatgaacaacagccatcctttgagagcagtgtggttcagaagccacacccttagtgcctacatattcaggttggagaacaggtctgcagccagccctcagcagatacagggccagcttggaggataggctgaccaaagaactgagaagacttatttggtctccatcacagttcttggagaagatggaaaaaagcggggtggttgagcacctgacattcaaaattgacctacgttgagtgtttgagttgtgaaaacccattaacaagaaggcgaatgtttggctttttgctgccacagataagggcagcttaggagagttgcactttttaccataccctggaataaaaataacctatctgtctatatcatagacagaccagtttggggttttatcctttagtgttttgtttttttttttttgagacagagtctcactccacctgcgctggagtatggtggtgtaatcactgcgccctgcagcctcaacctcccgggctcaggtgattcccccacctcagccgcccgtgtagcggggactacaggtgcatgccaccatgcctggctaatttctgtattttttgtagatatggggttttaccatattgcccaggctgttcttgaactcctggcctcaagcaatctgcccatcgtggcctcccaaagtgctgagattacaggagtgaaccactgggcctgtccctcctttgatgatctggattaacctgccaacagtctgtcttttcctgtaagtctgaaaaaagccacatcctaaccctgaaagggagatcaggtctacaggacttgtgggtgttttttccaatgctgccttcttcccccaccctctgcctcccattccaggtgggaaacgtgctggcagggtgacttctctggattataaactccgtgccctcacagctctgaagactcagtagccagcactaacattggtgaggggtgaagagctgctaactgatgcttattatgtctgagcgccaggaacttacaagaaaagtggcccctgcttctcccggaactgatggttcaaagaagccagcagtcaggctgacagcagtcctgccaaaccttctctcagatgcaggctgtccctaaatgataacaagctcctggaggatctgggatgccaggatgactgaatgctcctgtcctctctcaaaccatccagcaaaggggccgagagctgtttcctcacccagtaatgcaggcaaaatgctgcatgaactggacagaattcatgagggtgttctggttggaactatctgaataataactgctccgggactgtgggttgtttgatattttatttcctaagaagggtaggggaaaacatgtagggacccaatgtcttggtcccaaaagataaacccatcgtggggcctgtgaaagaagaatgacatccttatctcaggctgttcttggactcttcatcacagggtgtctgagcctgtgtggataaaatgttctggaataatggggccgctctttccttccccacccccatccaactgtgaaacaagttgtcatctcagaagtgccacagaagggggtggcctcctgatccacttcccgactgacctcacagcctccaagtcctggctgaagattccaggtggtaactgcaggggctggacaggaatggtgcaggtctgagcatgtgcacactgacagctgtgagcgatgggggaccctggccatgcagaagaggcacctgctgccaccacaccctgtggggaagtgggtgtggggaggaagaaaagggaaacatccttcttggtggcaacttcatagcaccagtcccaggatgagtggagatggccactacacagtctccaagtgacaggagcagagtctggccacacgagtcccatcaggagaatgtggccccgcagggccttggcccatccactcttaccccagacctcctgggaactgcacagggccaatcttacatcaacctgtaaagaccccttggccacttcctgggaaggaggactggggcaagtcaccgaatatctcttgacttcaccttctcttgcacaacaggaaacatcagagccacttttgttattgtaaacattgaatgcatggagcatgtaaaggtccttcctagagtaggataaatgggagacttccttcttcaaaggcttcactgtttcttaaagctgagtcctcctggctcaaagagagcaaagataaaggaattaggagcagcctctctcaagccaaaacttacccttttgcattgattgcttctgtaacaaattcaagtatccctattggcaaatagatattttgggcagactaaagcaaagataaccaacaatgcaagacttcacattttaaattgtttcaaatgttaaagctaccagcccaagaccaccaggaacacacttgtcaaacacagtgagttgcattagcttgcaagggagcacacactggggagctatagacttctcaaataaggacagtcaggaagggtatcattatgggaactagcaggggatgtggggtcattcttgggaggactggtcaacttgtaaacaaggtgagttgctgggacagcatctttcctttagaatacatgcagtacacttaagcctgtgccgttactgtgagatcagcgtgcccatggtcttcttgagaacatagccatctgaataagggtgaagttagttcaggctgctttaacaaaatgctataaattgagtggtctataaatgacagaaatttatttctcgagcccagggtgggtggatcacttgaggtcaggagctcgagaccagcctggccaacacagtgaaaccctgtttctactaaaaatacaaaaattagctgggtgtggtggcgggtgcctataatcccagctactcaggatgctgaggcaggagaatcacttgaacctggggaatggaggttgcagtgagccaagatcatgtcactgcactccagcctcagtgacagagcaagactctgtctcaaaaaaaaaaaaaaaagaaaagaaaagaaaagaaaaaaagaaatgtatttctcatagttctagagactgagaagtccaaaatcaaggcataggcagatgccatgtctggtgaggtcctgatttctggttcttaggtgatgccttctttctgtgtcctcacatggtagaaggggctgccttgctctaggggtggagagggaacagttgtcttttaaaagggcaccaatcccattcatgaggactttcccccaaaacgcccccccaccatgacttaatcaccttccaaagaccccacctcccaataccatcacctttggggttaggattttaacatatgcattttggaaagacacaaacattcagaccctaacaatgagcttagatagtttgtcttgaatgttatggtttggtacagtttattgtttgagagttttattgcttgggagtttttataccacagttttgcaagctgaggcttctgtttcaattgtttccttttgcagcctagacgccagtagattcatttttttaactttattacacctgattttcaaactattgcatattaaaattatagggccttttcctgatttatcaactttagaacacaatctattaacttatagctatgaaagatgggtgatttgcttatctgtaatactatccacccagcacctccaacttcacctaatttttgttttattttagtttttgttttttttttttttgttttttttttgagatggagtctcactctgttgcccaggctggagtgcagtggcatgatctcggctcactgcaaactcagcctcccgggttcatgccattcatgccagcctccccagcagctgggactacaggcacatgccgccacgcccatataattttttgtatttttagtggagttggggttttgccgtgttagccaggctggtcttgaactcctggcctcaagcaacctgcctgtctcggcctgccaaaatgctggggttacaggcgtgactcaccacacctggcctggtttttgttcttctaatgattatatttataaatctaaaccagtggttcttagccgggggcaatctccctctcctcagggggcatttggcaatgcctggagacatattttggtagttacaacttggggagtgctattgccatctagtgagtccaggctggcaatgttgctgaacatcctacaatgcacaggacagctcccacaacagagagctatccagcccaaatctcaatagtgccaaggttgagaagtcctgctttaaacaatatattaaaatctcttgacccaccaactatagataatatctgactttggatctataatgaaggacatgacccctctacttcattccaaatcttccctctctttcctctcaacctagtcaagatttgaacatctacattctacttagtaacaataactaagagtttggcctcaaggttggttctaaaaagtgaaacccaataaacagtattcataatactatgattatgcaaatattggtgtctgtgaactgtatggtgacactcaatccaccaagaaagaaatttgattttttgccaccaacttgggaccctcaaaggagactgaacagaagtgttaaggtcaactggattctcttttcttacacttcatgagtagttcacatcataccctattatatttggcttcacatttaaaccatgacatctttgcagtttctttattttggtcatgctttaactgttgtcttaaatgtttgttcacaaaggaagcagattgcctcacctcgtcatatgatcatgtagcttcttaatcatgctgcttgttaagagaatctgctttctttgtaaagctgtacttcctgaaagctgcttttgttctaatttggaatatttgctttctagttctgctgtgtggctctcatctttcctgcagctaagttcccttattcctgcagccaacttccttttgttggatcctttctagctccaagaggccatggtgggcaagtgctaggctctggagctacactcccaggtgcaacttctagggccaccacagagtagctgcacaactctgaacaagttatctgatctttccatatctgtttccttatatataaaatgggattgtgatgataaaaatagtaacccaactcatagggtagttgtgaggatgacgttagttaatgtatataaagtgcttaaaaacagtgcctggcttttagtaagccctcagtaagtgctagctattgtggtcattattttgctggagcatattcttaagtaatcttttcagacagagtaccaggaaggtaaaacttttagtctttttatgcatgaactgccattattttgtcttctcgtttgattgacagattgctagacataaagatccatggttaaatcacttaccttcagaactttgaaggcattatcccactgttttctagcatccagtgttactgatgaagaatccaatgcaaatctgatattcatccctttgtaggtgttggttttttgtatttgtgagtttttaggatcttctctttatgtctagtgttctgaaatctcacaaaattgtgcccggggtgaaatttaacctgttatacttgtccagcatttggtgaacactttctagctgatccttgtgtttctcttcagctctggtacatttttaaaactccggtaatttcaaatcaattatttttttctgaatattttctcctttcaattttcctcttttgtatttgtgggattgccatctgataaaatgctgtacttactgaattggtcctccatgtcatctacattttctttcttattttccaactttttattctggaagattttgtttacttatcttccaagctttttattagaagttttattctggtaataaagtttttaattttcaagaactttcttattctctaagtgctctttttttcagagcaaccattcacattttatgaatgtaatatcttctaagttttttctaagaaacttattagaggttcagataggaattttgttttaagttcttacctgttgcttaattaatctatgctttccctggcctcaattattctatttatcctcttggtcctcttatttggggccctttttcttttaatgtatggtgacctttggttgccatttgtatatgcaccagtaacaggactggttaatacaggtactgttactgtgtaagtctgaccaactgcttggatcggctaattgggaattgtgacccatttgttctctagtatttcatcttctccctgcatagacctcttgctcttctctactggattatttcatgggcaatgagcccatccaacagctccagcaagtccatacctatagtgtgagctagctcaagatatctcttcaagggcttcatcaacactggggcaaatctccaaagataccccctaggtgccaggttatcacatttcctgaatgcccagtagatacctatctctgtccaaagtgtataccagcattttgtaggcagggggttagaagccctgaaattaagacatccaagtagcccagagtagcctgtacagtctgctggtgcctacatgtataatctttccagatgagctgcaacccaattgaccaggcagtggggtccatttgaaacaatgggcgctgataaaccattgtggcaatgcccagagttatcaaggcagatgttggatcttgagacttaaggcgctgtcatggaacttaacaatacgccgtagtcctcaattcatgtctgaagcattaatgctattttcatttatttctgtctttcatatgcagtgggatcttaacaaattgaggcctagagatggacagaaagactcccaggcaccagaaagctatttcttgcagccaccacgttgctgtgattaacaaaatagttggatgcattttccactcaaaagtggctacagggggaactgagtgtgagttgttcactgtcaactaacagcaccattagaattatgttaaagctgagctaagagaagcaagagaaaggatgctactcaagaagaatcttctagtgaaagagtgaaaactttattggtctcaatggcagtggtgaatcaaggacttttttttttttttttttttttttgagatggagtctctctctgtcgcccaggctggagtgcaatggtgagatcttggggctcactgcaacccctgcctcctgggttcaagcaattctcctgcctcagcctcctgagtagctgggattacaggcacccgccaccacgcccagctaattttttgtatttttagtaaagacgaggtttcaccatgttggccaggctggtctcgaactcctgacctcgggggatccatccgcctcagcctctcaaagtgctgggattacagccctgagccaccgtgcccggcccaagaactttttaaattctgtgcaaccaagaaattcaaaactgatctacatgccctgtccaggttgaccagttatcccgctaaactagtaaccaccagagactgagcctggagtgggggctctatctgtgccttgcttagttcttcattttgattaaaaatacaaatgcctatattctacccctaacccctttactgactaattcatgggatccatttgaccgctattgatgttttctcacttattaaaaaaaatagtttcagtgtaattattctgagttaaatacatttgcctctttttatcctaaaaattggaagttgaagaatccttttgttgcccttaatgagctaccgtagtagcttcctagggctgcagtcacaaagtattgcaaactggctggcttgaaataacagaaaccattctctcacggttctcgaggcagacatccaaaatgaaggtgttggcaggactggttccctcttggagactcaaaggaagaactggttccatgcctctcttctatcttctaatggttgctcttggtttgcaactgcgtaaccccagtctccatccctgttgtcacatggctgttatccctccgcatgtctgtgcctttacatggtgtcctcctctgtatgtgtgtctctgtatctattttcctcttcttataacttccatcttagttacatctgcaaagactccatttccaaataaggtcacattcacaagtaccaggagtccagacttgaacatatctcttgcagggacacagctcaacccccaatgcacagtgtgcctgtcaacttccatacacactggtttggttctatcccaggaagtggggagccagggctgagagaccaaaaatcctagatcctggtcccaagttctcagcccatgactacgcattactgtttctaacaatgatatcaaaggatcctaaagactggttatattgaaatacgccaaagacaacctctaaccctgaggcccagaaagccccaggaatctaagctctcagtcttggacccaacagcaagccctctctcaactactctgatggtctcctggccccgacatcagcatgtgtagcctcctgctgcctgtctgcaaagccgtccctgcacaatacactcttctaagcatctcagagaggacaggatgtggctttgcatggtagttggaaatgatcaagaaaatatatatttaccaaaatctgagctgaaattaggatatccggatgctgagtgttaatgagcagcgtgtcggtgtttaacaaccggggccacaggccatcagtttcacaggactcatttgaataatgcttccaactgtacagacagtgcagggaaagcagtacacagattggcttatcaggaaacacataaaggaaaggaggagggggaaaaaaaccccatgggatcctgcaggctaaaaaaaaaaatgctaaaaggaaaaataaatgtacatgtgtacctcttaagtctcacaaatctgcagggatttgtaactcaggaaaaccctgaagtgaaacacaaatcaaaaagggaccaagggccataatccacattcctaaattagttgtcttttccggtaatgaaaaaagaatcagactgtaagtatacaatatctctccctgtcattgccgcttctttcattgctttcttaaaatattacaaagcaaacaaatcctgcattctaatccattataaaccagttccatatctaatcaacttgaagccaaagccatctgagcagtgcaaacattttttaaaagagtcattctaagataagcaaaacaggaaattggaggttgacgatgatgaaactgatatccaaatggtaatctgagcagtaaagtcactaaacccttcctgcaccataaacagagtttcttgggatgtgtttcattcgctttccctggcgatttggcagtaggttgtaccagttagtacaaatcatcatctttctcttccttaccccatgtcggcagaccgcggccaggatgcgggatcccagggcgccaggcgctcccatctgctctgctgaacaatgtgtggtccaccctttatccaagctgcagaggggaagggcagatggagccaccttgccttctaagtgacttcagcaaaagcacatctgtcctccagggcaggttctcgaccccagcactattcacatttttagctggatcgcttttcgtcgtcggaggctgtcttgttcgtggtgggttgtttagccgcacccctagcttctacccactagatgccagtagcacccctcccagatatgaccatcaaaaaatgtctctgaacattgccaaatgtccctgggagtgggaggcacaatcaccccctgttgagaaccacttagaaagaacttttgctgggaagagctcagagcatgcatttaaacagtgttcggtgttctcgcattagcctttcccaagggaattagttactaactgaatgtcaccttctccacgagacttcccctgagcaccctatttatgctcactcactattttcattacttatcatgttaactgtttaatattctgcctcccctgttacactatatgtagttccaggcacagagtaaatgttcaaaaacatttgttggccaggcaaggtggctcatgcctagaatcccaacactttgggaggctgaggtgggaggatcacttgaggccataagttagagaccagcctggtcaacatagtaagatcctgtctctactgaaagaaaaaagaaaaaaatagccaagcacaggggcatgtgcctgtagtcctagctacttgagaggctgaggcaggaggattgcgtgagcccaggagttagaggctgcagtgagctgtgatcatgccattgcactgtagcctgggcaacagagcaggatcctatctttaaaaaaagaattaaaataaattttaaaacatttacttatttgacaaataaatggaaagaaaccaaacttcacatagtataaacaaagaagaaatgagttgcccatctaactagggtgatgtggtgaggaggacccagggctcctggactcagtgccacagccacggtgccaacaatgaattcaatgacacctgcttgtcagggctgttgggggttaaatagggtcgtgtgtgtatgtgcctaacacgcagcgcatgtgtgggtgctccggcctgccccgccttccctacctcttttctgatgcagcatcctcagctcttccccagggtgctccctgcctgtggactcctggggcccaggccagaccctgcctgcagatgatttgaggacccgtgtctttagcagcctgtttggtctgaggcctgggtccatggtggcagaccacttgccagaccaaccccttggctgcctggcctgtgaactccagccgccccacctctggccagcaccctgggcccatgcacagttcgacctgggcgaagctctgtctgccacctgggacccccaaaggtgccaccttgcctgagccaggcactccctgctctcctaaagtcactcaatcttaggaaatgtctgttgtccaatctggcacactccatgctgtgggtgctcacacttcttagacgtagtgctccactgggtgtgctctgttcttggggtaaagctaagtccttgtggctttagaccagagaagtttctttctgtcttacagggagttccaagtagtgagggctgctcagctccacacagtcactcagaaacccaagtccctttcccgtgtagctcccccatccccatggctttcttgttgtctacgtgactgaattcacttgccttcccctgcttccagccaggggaaggggaaagagtatggaggagatgagtcctacacagagacatgagtcccatatccagaaacggcacttccttacattcccatgggcaggaatctagtcccacggccacatctcactgcaagagaggccgcaaggtgcaggcagaagggagggcaggcagaggggagatgtggggtcccttccccactcttctccagcaatcatttcctgagtgttttgctgactgcagtcacctccactccagtgagctccttaatccagcagagaagacacacacccagagcacaatctaagaggacacagaggagtgggcagctggcttggctgttgcacttgaagacaggatcccaaccaggagcagacgggaggcggcattcgagctggcgtctatctaagacaagaggaggaaggacagggtgagaattttgcctggtcttaaatccatatgcccttgagttttttcaatccttaggaaaatgagtgaaacagacctgggtcatttgaccattaaagattttggacaatctctgcaagagttagaggcaccatgtgccccagatcatcacccttctccaaaacggtcccttggtttgcttggttatttttgtagagacagggtctctacaatgcccacactggacttgaactcctgggatcaagcaatcctcctaagcagctgagacaacaggcacatgccacctggcttgctgacctccatttctgtttccaggagagattttttgttttgttttttgtttccagacagggtcttgttttgtcacccaggctggagtgcagtggcatgatcatggctcactgcaacctcaacctcctgggctcaaacaatcctcccatttcagcctctggagtagctgggaccacaggcacatgccaccaccatgcccaactaatttttttatttttattttttgtagagatgggggtctcactatgttggccaggctagtctcaaacttctggtctcaagtgactctccaccttggcctcccaaagtgctgggattataggtgtgagccagcacacctggctgggagagacttcttgattagcagaaggcaaatttcattaattcaaagacaaagccatgttcaatgagttgccagaaaaataaaagttgatttaaatgtcccatgactaagtactgagtcatcatttgtcattattattttattatttcttacttgtgagaaattattttattaatatttttatttacctttattatttctcagctggagaaaccctacagaagggtgctggtcatgcagcctcatggccaccgtgtcctcagcaggcctggttccttccccccaggaccacggaggcacagccgcccctcaggggcatagcatacggtgtggtgcggcccctcttttcctgagctgagattttttcgtcttgtcacgccccccatctcccatgcggcctcctcttcccaagacccctggcttcactgcagacttagccaccagctccgcatcatttgcccagcctgcaacctcccggaggtgcttccccgcctcccaagacagcgggtaggtgccaactgctaattttcttccagtggcccacccttacaactcatccattgcactccaaaagattgttttttggaggacatttttttaaattttattttttccataagttattggggtatgggtggtatttggttacatgagtaagttctttagtggagatttgtgagctcctgctgcacccatcacccgagcagtatacactgcaccatatttgttatcttttattcctcacccccctcccactcttccccccaagtccccaaagtccattgtatcattcttatgcctttgtgtcctcatagcttagctcccacgtatcagtgagaacatacaatgtttggttttccattcctgagttaattcacttagaataaaaatttccaatctcatccaggtcattgcaaatgctgttcattcattcctttttatggctgagtagtattccatcatatatatatatgtgtatatatatatgtatatgtatgtatatatatgtgtatatatgtgtgtgtgtgtgtgtgtgtgtgtatacaccacagtttctttatccacttattgattgatgggcatttggattggttctatgactttgcaattgtgaattgtgctgctataaacatgcgtgtgcaagtatctttttcgtgtaatgacttcttttcctttgggtagatacccagcagtgggattgctggatcaaatggtagttctacttttagttctttaaggaatctccacactgttttccatagtggctgtgctagtttaccttcccagcagcagtgtagaagtgttccctgatagtaaaaggatattttaaatataaaagaaatgcaaggtgttgtggtggttaattgtaggtgtcaacttggctaggccgtgctgcccagttgtctagtcagacatcagtataaatgttgctgtgaaggtatttttcagatgaaattaacatgtaaatcattggatgttgagtaaagccaagtaccatcacgtgtgtgggcctcatccaatcagctgaaggccctataaagagactggagtcccctaaaaaaaaaggaattctgtctcctgaaggccttcagactcaggctgcaatcaactcttccctgggtctctagcctgctggtctgctctgcagatttcaaacttgccagtctcggccagccacagtggttcaaacctataatcccagcactttgggaggctgaggcaggcacatcaccagaggtcagaagtttgagaccagcctggccaacatggcgaaaccccgtctctactaaaaatacaaaaattagcgatgcatggtggcaggtgcctataatcctagctactcgggaggctgagtcaggagaatcacttgaatctgggaggcagaggttgcagtgagccgagattgtgccactgcactccagcctgggtgacaagagcgaaactccatcacaaacaaacaaacaaacaaacatcttgccagtctccatgatcccgtgggctaattcctgaaaatctctttgcgtatgtgtgtgtgtgtgtgtgtgtgtgtgtgtgtaatatctctctgcatatgtgtgtgtgtgtgtatatatatatatatatagagagagagagagagagagagagagagagagatcatatacatatataaaagtatatgatatacattctattggttctatttctctggagaaccctggccaataaatcagtgctactcattgatcaatgtttccttgtcctgtatgttttaaggtgtcttcattttctttttatgatcctgagttggccaccaaccaacaaaagtattctcctcctgagtggcacactagatattgttctcctaaaaattcagtcgagattccaatatttggtcaaccccacaaaaacactcatgttctagttcagtcaggataacaaatgaaacagttcccaacttacccaacttcgattgtctgaccgaactcaggctcacatgatatttatgtctgagtgccccacaaacacacaactgaataaacagccaattcacttcgaaaaattcccatttggccacaatcttgcagctgtctgtgaactctgccccgcctgaaacacactttggtgctacaaagagcattctcctccccggacaccatatcctgggaagcaaggaattgtttggagatgctcccagctggccacccagtctctgtcctcagggatccagaaagctctggaggctgcctggccctcggcactgacctggagcagaattgggaagtaagtggatgtggctttttctacccgtgggctccaggaatcagccttttccagctcctgtggagtcacccatgagatttccattaggaatacctttttgtttctcttgggactacttgttgttggtttacttatttatttatttattttcattttccattttggctttcacattgcaaagaatgggccatgtggcagggacacctctgctttgaggccagcatgggcaccttacacccccaagtgggctgcagagcctagccggactgaatcccatcagcaggttcttttacttcttccaagatggtagcacttcctgcctggcaggcactgctgctagtcaggttgagaacgtccacaactcgccatccccacgtgtgtgcagacatgaaatgcctacgtggcaaatatcaggcctggcagaaccaggcaaatattgacacagccaggtgaggggaagcattcattctttctgtcagcatttacaaagcacctactaagtgtcagggcttgtgctaggtgccaagcaaaaccaaacagggccactgccctccttgtgggaggcaggcacgaatcctatttattttgggtctcagagtcctggtcccagagcagagattccataaacattttaaattgtgtgtgtgagtgagaacaggagaggagagtgcatgggagggttcgcacctgacatgcccacactaaaaagcggacctccacctttagttcctccctaatggagagccatcaccgacactccattagggagaaaaaaaacaactcgtttttctcttgagagtcggaacagtattggttttcaatgtttcaaacctatgaacaaatacccccatgtgtaaagtcccatttcactcaagaatcgtctgtgttgatctcaaacacacatttatgtttcttggttggaaaagaagaaaaacactaaacgaattttagtgaccatttctttaaacctgagaggatggggaagctcagctttcagactgtatcagcaggggatgcgattccacactcgggtgtcatgtgatagcattcacagagcacaggaaatacttccgcccgcccgtcagccgggacaatgggactgaaggtagctgggggagaaggaggggtatgaaggaaatttcaaggaagacaatgaaaagttgagtaaaatccttcattgtcaaaatgagatcaaattagcaatggtctcaaaagctgtccaaagtgagggaccctccttccccatcagagactttctgtttaaggaagtccacaccagcaagagttccctaaacagtgtgttttaggagtacaccccaagaacactcactgaattcccttttccctaaccttctagaagccttgccccagttttatccctgtccttactgtttgcttaaccctgtgggccaaagctccactacagccatggatgactcacaagctcaaaatgccttcgtcctaagcttcactagccgcacgactttacaattgttcccaacacactctgtgtgctactgcaggcgtctctgggaaatatttatctgccccgttgcagttccaggtgcaggtagaagagaggacgcggctgttgaggacacagctgttgaatccattcccaccttttgctgtgtacataaaatacatagtggcagggccataggacttcctgggcaaggtagaccaaggtgacagagtccaagtaactttgaaaaaaaaaacaaaaacaaaaagcccacacactctgccaggtgtggtggctcacacctataatcctagcactttgggaggccgaggtgggtggatcacttgaggtcaggagtttgagaccagcctggccaacatggtgaaaccctgtctctacttactaaaaatacaaaaattagccagaaatggtgacaggtgcctgtgatcccagatactcgggaggctgaggcatgagaatcgcttgaacctgggaggagaaggttgcagtgagctgagattgcaccactgcattccagcctgggcaacagagtcagacactgtctcgaaaaaataaaaataaaaaaaaaacctcacacactctatatacatactatagaatattactcagtcataaaaaggaggccaggcatggtggctcatgcctgtaatcccagaactttgggaggctgaggtgggcagatcatttgaggtaaggagttcaagaccagcctggccaacatgttgaaaccccgtctctactaaaaatacaaaaaaaattagctggacgtggtggtgcacgactataatttcagctattagggagcctgaagcaggagaattgctggaacccaggagacggaagttgcagggagcagagattacgccattgcacttcagccctgggtgacagagtgagactctgtctcaaaaaaaaaaaaaaaaaaaaaaaacacaactaaaaacccacatgctgtatatgcatgtgacagaatattactcagccacaaagaggaatagttctggtcaccctacagtatggataaaccttgaagatgtgctgggtgaaggaggttagacacaaaggaccacacatgacatgattgtatttatatgaaatgcccagaataggcaaatccagagagacagaaagcagattggtggtttccaggggctaggaggagagaggaatggggtgcaactgcttagtggatagagggtttccttttggggtgatgaaaggcttttggaactagatagagggagcgggtgtagaaatgccactgaattgtgcactttaaaatggttggttttatgttaagtgaatttcacttcaataaacccacccccacacacacgcacacatgcatgcacacttattgcttacatccccaaaagaggccatgattttttttttttttttttgagacagagtctcgctctgtcgcccaggctggagtgcagtggcgcgatctcggctcactgcaagccccaagaggccatgattttaatctttgatttcacctggatacccctggcaaattgtatttatattttaaaaataaaactccttggctttaggggtgtagagggcccaattccagaacatttggatctctcctctccggagaaacaccatcaactcaggaatagaggcgttgagggaagaacacgcaatggccaggacttccccgccggcccgtgttcctgatgcatggctgatttccctttagccgaatgcaacgataacaacagtgtccttgggaagccaccctccacccattgccttccacatctgcaataggggttgaatgacatggagtttcttgtttcggtgcttgaagaatgatatggtatgtcagatgtcacgggacattaaataaagctgctcagagatggaaattgttaccgtatttatttggaagtaccagcagccacttaattgcaatttgcagaaacaagctattggctgagagttatttttatcagttgattccacggtggattaagtgtttctgccatttccagggtgagcatcaaatgccacaggctaaccttggaggcgggcatcatctcccagtgagccttgggggactgatggaatttggtgaggcgctaaagcaccgggcctgcccggggggcctacctcatctcacagctggtacacagatccctccctgaacatacccccaaagaggctcatggctcatactcctgtgtcagatgaagggccaccacgaatgtctagattattccttttttttttttgagacagagtcttgctttgttgcccaggctggagtgcagcagcatgatcccggctcactgcaacctccacctcccaggttcaagcgattctcctgcctcagcctcccaagtagctgggattacaggctcgtgccaccgggcccggctaatttttgtatttttagtagagatggggtttcaccacgttggcctcaaaatgaatttttttccttaaaattcatgggttaaaacttaatcgccattgtggtggtattaagaggtggaacttttggaaagggattaggtcatgaaggctccgccctcaggaatggattagtacaaaggactggaggggctgggtgaggtggctcatgcctgtgatcccagcactttgggaggccaaggtgggtggattgcttgaggtcaggagtttgagacaagcctgagcaacatagaaaaaccccgtctctactgaaaattaaaaaattagccagcctgtagtcccagcttcttggagggctgaagtgggaggattgcttgtgcccgggaggtggaggcggcagtgagccaagatcgtgccactgcactccagcctgggtgacaaagcaagactctgtctcaaaaaaaaaagaaaaaaaaaggactggagggaactagcttaggccctttttgctcttctgccatgtgagacatggcgttcgtccctctggaggatgtggcaacatgtgccatcttgggagtggagaccaggccctctgtgagtgccttggactcccggcccccagaactgtgagaaataaatttctgttccttacaaattacccagtctcaggcattttgttatagcagcacaaataaactaagacacagggacctgtatgttgccactagaactcctatctatctacctggttaactagtcatccatatctccatccatccatccattcatccatccagccagccagccagccctatgtccatccatccattcatccatccagccagccagccagccctatgtccatccatccatccatccatccatccatctgtccatccatccatccatccattcatccatctctctcacggccctgcttctctctgtatttttgaagcactcaggctctgaaacccaattattggacttcaggtcctagtaattccatactgtatatctctgtggcatttggtgatttactgaaactctctgtgccttaatttctacatcttcaaaatggggatacaaacctatctcagaagactgatgagaggattattgagtcactctcataaagcatgtttgggatagtgtttggcacttggtaactgctctgtaaatgttagatgtcactatcatgactgaagatgggctccctgcatgtggtttgtggggtggggggtggaaaatagccacagagagctcccaacctatgctgttccatctcagcaaacctgaaggagaggaagagtgttgctcttcccagcattgatacataaaaccccaggagagaattctggagccttgacctaggtcactggcccatctctgggtcactccctgtggccagggggtggagtcctaggattgactgaacagacggcaccaagccattcaagagggatctgccacccacgacccaaacaccttcttctaggccccacctccaatagatcttccttccttccttccttccttctttccttccttccttccttccttcctttctctctctctctctctctctctctctctctttctttctttctttctttcttgtttcagggtctcactctggtgcccaggctgaagtacagtggcacaatcacggctcactgcagcctcaacctcctcaggcttgagcaatcctcctacgtcagcgtccagggtagcagggactaaagtcatgtgccaccacactaggctaatttttagagatggggtctcactatgttgcccaagctggtcttgaactcctgagctcaagcaatcctcctgcctcagcctcccaaagtactgggcttacaggtgggagccaccacatctggcctggggagattgaatttcaacatgaggtttaaaggggacaaacatccaaactatagcagctccccactagaaacctcccagagtgatgaatatcagtaatgccctaccatctcccccaggctcccaccccttcccccacgccaaggtctagcccaagagcaaaccatgggttctgtgtctgcaccagcaggcgcatggggtcctgtggtgtgcctcggcccgagttcacacacaagtggacctcttctccttggcacaaacacagaattaagtttgcctctcagagaccacagtccagaggtaccccaatgtcagaatcagattccactacccacttccctggggagaggtgagctttagactctgcctgtctagaccccagatagatcgtgggggacctctagggtacctgtccaggaaacgttaggaagttagatgaagtagaggagaaaatgggcccaacagtgattatgaggactgacaggtctttgggccaaagcgtttgatacttggatggaaccatgtgggtacactgaggacacttccttctgttggcctttgtcacccagtcctctcttcttaggatttcccggtcttctcttttccaataacgtccccctttcctggctttgtttttccctccaaagctttatctctccccatactgatctgaatctacaagtgagactcatggacatttctcctccaccttatctgctgctgaagccctgcatccaccccccacgcacacacctgacaaccggcagaggtagacgtctttgtttgtcagttattggagaccaatggcattttaaaaggttatttctcttacaggaaactgtgtagcccagggacagtcaccttgtgagcttctttattcatgaaccctcactcttcctccaggattgatgggtgacagctccttgctctgggcctttcttatatatatttacagtagtctctgaagtacatctttaatcaaaggggccatgactcattgacacatctttggaatattactgagtaactcattaaaatgttaatagcttctgtctggatgtattgatcttgatgtcaactattcttggaataataaataaagttgatttttaaaattttatctttcaaccatgctgagtgataagtgagccaaggagtgtctgaaagaaaataagtcaccttggaagcccccgatggaacagaatcaaatagagagggtcctatccagctctgtgatgacaaatgttatggcagacagagttaagctcaaactcactacagaacaggggaaaacacccaaaatccacggaccatgttttttttcccccaggatgtttctaagtaaataaatcaacaatggcaactttgaatcaataatttgtaaatatctctggatgtctccaagtgctttcagcggtgggagcatgagtaacaccagatttcaaggaaccagcatcccaggagccatctttggttttctaagactaacatccaagatgggcttcctccggctttcagccacgtgcgccctgcctgctggcttctgctaagctcccctttctacctttctggtccttgaagacgtcaagcccacacctaactggccttctgcccttgatggtccctccattggtctctatcaagggccttctgcccttgatgttctgcctggagggctctttcagcctcagctgtccatgccgctgctggagagggttcctgaacttcccatcctgaaactgccgccacccgcccccaacctagccctccccagcctgggcctgctgggtgtttaaatcatcagtgtggtttgtctacctgcattttcatggctccttccagaaggacttgtagggactgtgtgtttaccttctcctatcttactcctgggtccatgtgggcacacagtaggcattcaataactgttggttgaataaatgaatggaaagtcccctaaaatgaggaagagatcttgggatgcccagagggatgaagctgaaaaagtctctaacaagaaaagcaggggataggctggaaagggactgctgctgaaaacccgttaagaaatgtttccactcccaggacagggaggaggaagcaatttagttggaacgtgcatctaggcctcccattactccctggagctccatcacgggaaaaatcctttacatggatccgtgactctgggcctgagtgccacggtttcaggacgcggtcaagccctaagtcaacgtttccagaacaaacacccgcgaccagaagcggcaagggccgccaacacaccacatcactctcccggccagggccaagtcctggtaggaacatgattatcattcctgacgatctgccgtgccgggctggctgctctgatacccgtcaatgggctcattcagccagggcccggttttgcatattattcttaataaacattcatagcccaagccataatggctctttcaaggctcctgctttgaatgcgtggtaacaacagagtgcctttgtgtacttacatgtaaaaatacactggccaccctgttgatacgcagcatatatatttataaatatttatcaccaagtcatggctgacattttcaaaatgctgcttttgaagtagacctcgtttttctgtctcccaagctgagaggccagacgaggttaattaatccaattttgcctaataatgtgcagtgtaatgatctccatgccttggtttatttgtcaagggggagggggctccacggaaaggcctcagtgactccaaaaggagggatttcccgactgctgccttgatctacagccagcctggggtgatggagacgtgcccgcagcaccttctggggaagcaagaaagagaagaagctggtagagaaagagatccagggtctggacttggttcaccccaggggtgggggtaaagctgcggaaggaacttctctcccaattccatcccctctccctgcccaagctcctgggagacactctgattactgggaaataacattccaaactcacgccgatggactggacaggaactccttgccctccatgctgtggtcgatagggaagcacttgaaccaggatctggggcaaggcaagtgttggatctgatcaagactggccagcagaaagacctggtcttgaagcagtgaagaagtccatgatgccaatggtttggcttctctcattaggttgctttcacaaaccaccatgcgctgaagactccttggcaaacctgatccctcttgattatcccaacaagggcctcctgttttgtgcattttgactcgtattcagactcgtcttctagctcttaaagatgggaggcctctgcaacagaacaatgcttggaaaggggatctttaagcgtacctaaactccctgagctctgactcccccgtttggctctgctcaactccagtttgggtgtcagctttgcactgctgtggctctcagtgtcctgggaatcctgtttaccagttcccattctccatccacaggtgggctcccaggtcaagagcagatctcacagaccactgctcaaagcttatcctggccaggtgcagtgactcatgcctctaactccagtgctttgggaggtcaaagtgtggggatcatgaggccaggagttcaagaccagcctgggcagtgtaagaagacctgtctctgcaaaatgtatccatggattatggctcacacctgtagtctcagttactccagaggctgaggcaggactgtttgagcccagaaattcaaggctgcattgagctatgattcccttatcacctcctcaaccctggatttgtcactgtccagctctgtggggccaggttttccatcctatgcttccctccaccccacactcaccttcaccctcttgtctctttattaagcaaaactgggctgccaaatcccaacacgtttgtcccttttaacattcttcaaacaaaacctaagcagcaaaattaatttacttaaaaaaaaaaatcaggtgccagcgagagccagtttagattttaagccactttttatttggctcacctgcatgccacggaagcccgtcagcacctggtgctcactgacatggtgtttgagtcacagttgtgttactcaatacacccctgttgagtggatcagcacccaagtgggcattcactgtgccccacattcacttcctcataccatacggccagaaacgcagggaaaaaaaaatcccagctttgcttcctaaaacctgcgtgaccttgggcaagttacctaacctgtctaagccataatctcttcaactataaaacagggctgataaacttactccacagggcaggggtgagtacccaataagacaatttgagaaagcatctagcacgtggccaggccataatacgttctcaacaaatctctattgaatcagtgaccaatgaaatggcattctagaaatgcatttatttctgctatttaaaacagggttaaaaatttacaagaaaaaaaaaacaagcaacttcattaaaaagtgtggagagaacatgaacagacgcttttcaaaagaagacttacatgcaaccaacaagcatatgaaaaattcaaaatcactgatcattgtggaaatgcaaatcaaaaccacaatgagatgccatgtaacaccagtcagaatgactatttttaaaaagtcaaaaaacaggctgggcttggtggctcacgcctgtaatcccagcactttgggagggcgaggtgggtggatcacaaggtttggagttcgagaccagcctaccaacatgatgaaacctagtctctactaaaaatataaaaattagctgggcgtggtggcatgcatctgtaatcccagctactcaggaggctgaggcaggagaatcacttgaacctggaaggcggaggttgcagtgagctgagattgcaccactgcactccagcctgggcgacagagcgagactccgtcaaaaaaaaaaaaaaaagtcaaaaaataacagatgctgatgaggttgtagagaaaaaggaatgcttatacactgctggtgggagtgtaaattagttctactttacactcccattgtggaagacagtgtggcaattcctcaaagacctagagccagaaataccatttgacccagtaatcccattactgggtatatacccaaaggaatataaatcattttatcacaaagacacatgcacatgtattttcattgcagcaccattcacaatagcaaagacatggaatcaacctaaatgtccatcaatgatagactggacaaggaaaatatggtacatttataccatggaatactatacagccataaaaaggaacaagatcatgtccttttcagggacatggatggagctggaggccattatacttagcaaaccgatgcagaaacagaaaaccaactactgcctgttcttatttttaagtgggagctaaatgatgagaacatatggacacatagaggggaaccacacacactgggcctttctgagggtggagggtgggaggagggagaggatgaagaaaaataacccataggtatgaggcttaatacctgggtgatggaatattctctacaacaaattcccatgacacaagtttacctatgtaacaaacctgcgcttttatccctgaatttaaaataaaagttaaaaaatcacgcctgtaatcccagcatttgggaggccaaggcgggtagatcacaaggtcaggagctcaagaccagcctggccaagatggtaaaaccctgtctctactaaaaaaaaaaaaaaaacaaaagttagctgggcatggtggcaggcgtctgtaatcccagctactcaggaggctgaggcaggagaatcacttgaacccaggaggcagaggttgcagtgagtcgggatcgcaccactgcattccagcctgggcaacagcacgagactccgtctttatttatttatttatttattattttatttatttatttattatataaaataaattttatttataaaaatatatttttatttattttttatatatttatatatttataaatatttttatttatttattatataaagataaataaatacaaatttaaaaatgaaataaggttaaataatacctggatagcaccagcagctcaatcttgaggcttgtagcactaataagcttttggaaacaagtgagtgtgtccagcattgtttagcagacattccctctcccctggatgccgtggtactttatttatgctcttgggcatgtatcttacccctggaccatcctacaggtgggaatcccctgattgcatctgtaattaatgttccatgtgtgatttgtcctcagaagccctgagctgaggaggcacttaataaatatttattaattgacattcgagtggactcgtgtattggacacacttaatgtactcctcaggttctctcagcctccccttcccccaggccctcatctgtgggttctgcctccatgggtgatcaacttccttgggcccatgtgattttactgcctgaaatcaaccagctccacacccagaatctctagctccttctggtgtgtgggggctcagatgaaatccacaccataggatatgggatctggcttctccctggctggggaaggaactggatgaggcaattgatagtacaggggagttaatctcccagtgtgtggacttgggccaatgggacgcaggagattggaggaagcctagcagacaagagccttctctctttctccctctaattattactcttcaacacagttactccacacagcccatctggggacactccatggagctgatgagtatacctgccaggcaatggcctctgtctacacggcatgctgcattgcgtcccatcctgcttgcctcacttccccttgaccacactctcactgcccaaagagtgcacctttcaaataaagcctttgcccttaatccttgcctcaggctctgttttcttggggacttgggctaagacaggtcatgtgaacgttgcacaagccagataacagggaggaaaaggctttctgaattgagaccatgtatgagacaagggctgggattgttaataagcccattcagtgaattttttttttcttttgagacggagtctcactctgtcgcccaggctggagtgcagtggtgcagtctcggctcactgcaacctctgcctcccgagttcaagcaattctctgcctcagcttcctgagtagctggttttacaggtgcccgccaccatgcccagctaatattgtgtgtgtgtgtgtgtgtgtgtgtgtgtgtgtgtgtgtgtgtgttttgatggagtttcgcactgttgcccaggctggagtgcaatgtcgcgatctcagctcactgcaagctccacctcctgggttcacgccattctcctgcctcagcctcccgagtagctgggactacaggcacctaccaccacgcctggctaattttttgtgtttttagtacagacagggtttcactgtgttggccaggatggtctcgatctcctgaccctgtgatccgcccgcctcagcctcacaaagtgctgggattacaggagtgagccactgcgcccggcctaatttttgtatttttagtagagatggggtttcaccatcttggccaggctggtcttaaactcctgaccttgtgatccacctgcctcggcctcccaacgtgctgggattacaggtgtgagctaccacacctggcctcagtgaatttttattgaactgtttgattaacatggtcatgccaactaccaccttggagcccaggtcatcagaaaatcagaggcaccaggctgtgggccccatgcaccagctcactcccctgggctccagctcagcccagcctgatagcccaaaaagtcttcctctcagccgttttgtgtgtggggctgtgtcttctttagcagcttgcaaattccagccatggaaacccaagcaagggcagagaatcagagcagattctctcctttaccttgtgctatattttaataaattaatgcagttgtagttatgtagaaagagatttgctctcgggtaatgaggacaacatggcagcctaactgctggtgcatgaattgggcaggcaggaggccttaccctcagggacacctgctctctcttaggtcggccaatccacaacagggcgctcatccaatttctgtccacctgagagtccacgagggcacacccagctgtgctccttcctgatcaggtcccacttaccacccacaaaaggggagaacatggctcttttgaaggatcctcattgagggctctcatgagtaaattatcaatgaaagttgataattaaagcaactacctcatttgttgataatccagcaacaagtgaggtagttacattaatattaaaagcagtaacacacaccttagatttgtatggcattgtgttgttttaaaaattcttttccaggtattgtgcagtctgattacaatggcacaagctacagctcaagcagccttgagctaagaatcgttgaatagtagcagtgccatagggttcaatgtattcggcagccgacgtccagattccaggggaaaggcaacgtgattacacagaggctttgtgaagggaaggactaaaggaagagatgtagaaagaggggaaagggccgggcgcggtggctcacgcctgtaatcccagcactttgggaggccaaggcaagtggatcacgaggtcaggagtttcagaccagcctgatgaaggtggtgaaaccccgtctctactaaaaatacaaaaattagccgggggcagtggcaggcacctgtaatcccagatacttgggcggctgaggcaggagaatctcttgaacccaggaggcggaggttgcagtgagctgagatcacgccactgcactctatctagcctgggcaacagagcaagactctgtcaaaaaaaaagaaaaggaagaaaggaagaaaggaagaaaaaagaaagaaagaaagaaagaaagaaagaaagaaagaaagaaagaaagaaagaaagaaagaagggagggagggagggagggagggaaggaaggaaggaaggaaggaaggaaggaaggagaaagaataagaaatgggcactttgggaggccaaggtgggcggatcatgaggtcaggagatcgagaccatcctagctaacacggtgaaaccccgcctctactaaaaatacaaaaaaattagctgggtgtggtggtgggcgcctgtagtcccagctacttgggaggctgaggtgggagaatggcataaacccgggaggcggagcttgcagtgaacagagatcatgccgtcaaaaaaaaaaaaaaaaaaaaaagaagaagaagaaaaagaaaagaaatcggcatgaaatcaaagtggccaacaaggaccacttttcctatggagaagagttcagtgtggttttgaggtttggaatttgatctgtattctttcaaccaacaatgaacagatttaaaagtaggtatttgacaagtatttgctcactgatgaacaaacacagaggtcaacaaaagagggttaccagcaccccagagtgaaagaatggagagtgggaatgcggcttgtttgtctaagcagtggtggagctgaagccactttgatttccagtatggaataattcgtcaggtgacctgggatgagaatgttaaccctctttttgttgctatgaaaaaggcggataatatctattccatacagggcagcactaaaggagggtaaacatgattgatcactgtgactttgaggaaggaagacagtataataaatactaattataataaccattcctggcttctaagaaaaatgccttttaaaaaaggaaggaaggaaagaacaatccctccaacagggggcctcctgggacaggcttggtgtgtcatggcctcgtgccggtccgaataaatccaaaggggaaaggattcggtgacagttcacaacagcaggagcaggcagaagaccttcgcttttttcaacgttttacataaattaatttcatgtttcaattgccacattatcacaactttagattaatatacatggggccaagacttgcagataattgtatatttctgcacttcacgtaaatgctagctataaacatttaaaatgtaaaatgtaaaatgagcggtggctcatgcctgtaatcccagcactctggaaggccaaggcaggctgaggcaggcggatcacttgaggtcaggagttcgaaaccagcctggccaacatggtgaaacctcatctctactaaaaaaaatacaaaaatttgctgggcagggtggcgtgcgcctataatcccagctactcaggaggctgaggcaggagaattgcttgaatcctggaggcggaggttgcagtgagctgagatcgtgccactgcactccagcctgggtgacagagcaagactctatctcaaaaaaaaaaaaaaaaaaaaaaaaaaaaaaaatatatatatatatatatatatatatatatatatacacatacatatatatatacacacacacatacatatatatatatatggttggcctacatatatatatacacatacatatatatatatatatacacacatatacatatatatatatatatatatatatatatatatatatatatatatatatatggttggccaggcactgtgggtcatacctgtaatcccagcactttcagaggctgaggcaggaagattgcttaagctcaggagtttgacaccaacctgggcaatatagtgagacccatctctataaaaattacaaaaaaaattagccaggcgtggtggttcatgcctgaagtcttagctgctccggaggctgaggcaggaggattgctggagtccaggacgtcgaggctgcagtgagtcatgattgtgccagtgcactccagcctgggagacagagcaagaccctgtctcaaaaaaaaaaaaaagtaaagtccataaactagcttcatataaaaactccggtatatacaacgacagatatttcatcatctctggcccctagcaaatagttgcatccttgagtgaatcatttcagctctctgtgactttgtaattccaatcttatatcctgtacactgcctagtgccttctggaaataaatgggaacatgcctgaactttccagataaatttaccagccctttagcccttcccctctcggctctctgtttcttccctgtttctcgagaacacgcacatggtttacagcgtgctttacagcgtttcaagcccaaacagaacacgctccacagggaaggggctgattggtttagttttcaggcagccccgcgaggggtggtaattgacacttgaacaatgacatgttgcattccttcatatcgcagcagtaattgaacacacatgaaccccctgcactggtgaccctggagtgtgccacacacctggaaatagtgaggttcaattaatatgtcaccgccactaagcagctaccagtgagaaccaccagtcagctgccacagcccagcggtcacagaacaaagcagagagcaatgcggggtgaaccccgggagctgctgctcccctgcagagcttccccggactggcccctaaaatctggttttcccaaaaaaacttactcacttttaatgactccaattaattttatctaacagctttgttcacctctccctcaaagagttatttttgcattaaaatagcaaaatgctcaactagaaggggacggcaatgacccagctaaatttttgtgatgacacttttaatataaaaaacagatcagaaatggaatatgatatgaatatgaatatgaaaggcgggattcaagccaaggaaataaagaaagaatgatggattccacctctttcattcagtcccttgagtatttgtggtgtgctgacagtagcccggggttactgcagagattattgcaagcctggcagctgctcttccagagctcacagactcggggtgatagcacaatgatgtgggacaaatcccccgaggcagagaatggggcacccagggcagcctcatcagtgccctcccctcatctggaaatctcaggagacttcctggaggaagctgcatctaagctggagaagcagcaggagtgaggaggggaagagaagggagaggggagaggggtccaggcagaggccagcactgccaaggctgtgaggccagagagaaagtggcaacatgaggagggggtgcagaaggaaaaggggagtttggaagccaaggtcagaagtgggcacttccatttcagagcctagttacactttttccagaaccaatagctattctcctccttaaacacacacacacacacacacacacacacacacacacacacacagagagagaaagagcgagagagaatattagcattcaaacaagagtaaagctacaattttggcatattcttggaagagaggaaaatggacatttcattttatatttaataaattccatttaattaattaacaaaacctggcagcactccccgaatgaatgaaaatctgccaaatctgaaggccaacaacgctgttgcacaaagtctgacaacttgctgtccctggccacaccccagcccagatctccctgccagccttgtcattttgtcgtgcgtttgctggcagtggcacgcagcgggttacttcgggtctctgggctcaggcttcccctgtaaggtgaggagctgtgacttaggtatactgcactttagcactgggattggcctccagagagaacaggggcaatccgggacaccccgctggtccctctgtgacccactcttggcccttaagctccctaaggagggaggtctcctgtctatacaggaccaatctaggctactctagacatcaagatactgtagggtgcttccagttaggcaggtgtttctctctctctctctctctctctttttttttttttttcagacagagtccctctgtcacccaggctggagtgcagtggcgcagtctcggctcactgcaacctctgcctcctgggttcaagcgattctcctgcctcagcctctcgagtagctgggatcacaggcatgcaccaccacgcccagctaatttttgtatttttggtacagatggagattcacagtgttggccatgctggtctcgaactcctgacttcgtgatctgcccgtcttggcctcccaaagtgctgggattacaggcatgagccatcatgcccggccaacatgtgtttatctctacactctcctcaaatctcactaaaatgacagtaaaggcaaaaaaaggaacacacttgcagagacaacaaggtcaggagaagaaaccgtggaatatgagaaagcttagcaatattttgaagggagaacaatgcatgggctaatggtctctggcttagcgggctggagagagatgagccctgccagctggagtgaggtggagggggtgagccctcaagaaacaagatgatttctgatccagaatcacagaaacactcagaaatcaggggctccatatatatatatatatatatatattttttttttttttgacatagggtctcacattgtcacccaggctggagttctgtggcatgatctcggctcactgcagccttgaccatccaggttcaagtgaccctcctgcctcagccctccaagtagctgggtctacaaaggcacaccaccacactcagctaatttttttttttttttgtatttttagtagagacagggtttcaccatgttactcaggctagtctcaaactcttgagctcaagcgatccgcccgcctcagcctcccaaagtgctaggatttctggcatgagccacggcacccggccagccccaggtatttctgaatgtgagagtacaccagcaagctgcggaggagggttggttggaagactgtgcaggggaaggcagaccctcaggcccctcctgggtgcaccagtgttgctggtgctgctcacctgatctctgaatgtctgctgcttgccctccccttcagaatactggatatttcctctctgaccaggtgaaccagagaggctcagggcactggatccagctgagggcagcagaatgaaaagcatgctcactgaacagggagataaacccaccccatccaatggtgttgaaaagtatggtgtagtcttggagggaccagtgttcccaaacttgcaggatatcgccggaacccaaactgaaattatggtttaatgcctctcaaaactggtgagcccactgttcttctcacatgtatctccatatgtggacgtgcaccagagcctttttctaccctctgaaggagagaagcgttctgtttaggggctcgtagaagagaggaacatgagaaggctgagaagagtggaggacccaacagagaactaccatctccagtctcccaggctgggttgagcctcagcagaaaagcgtgttgacctcagcacgggcagtggaaaaccagacatccaatgtgtttgcaagaaatattcatttagattcacagagctcttggtctaagcctaggatcttggtaggagagggaggcgggggtctttggcctctgggattcattgtatcaaccaccagcaatctttggaatgggccagctgctccctaggccagagctgttagggctggaggcggggaggccatttggacagttgaagaactctgtaaaactaccttatgcacctgcaggtaaagtcacattttggggttatcaaagtctaaattaaatggtacatagtataattagtgctggattgggaaagagaagaattgctcattatatacccaccgctgtcattattgggacaaaacgatcttccactggccccaccagagcccacctctgcaagggccacggccagcatcctcacccacaattgctgcctcactcgtgggttctttcacgtggctgtgtggaccatgtaggtgacctcccccgtgctctctctgagccactgtaaaaaaactgattcttcagtgcatgggaagttcctgtggccctgccggttctcggacccggccttgacccgaagggcactgatgttctgctcaagtgcagaagggctggattttgcagggtcaggaaatacatttgtgcagtgactacaagatccccctgacatcttggtttgtgggaaatgcagattttcttttttctgtaacttaaatttggctctcaaggccccgtttctgctggtggtgggatacactggtattaatcttgccaagtcaaggtcaactccagctatttgttatttaaagcataatccctttgaagtaactctttagacaattcatcgttctcagatcaattccaggagcttcccctccgtgtctgcccactctggtcaccccctttcttggcactggtgatggcactcctccagaaaaatgccacccttgttctggcaggatctgacttccaatccagcccacagcctatgaccccttgtccctcagctcagggacccatggctggcattgtcaacacctccctgccaggcacctggaaatactcactctttgcccatatcccattgggctagggccatctaagaccccattgagggctgggtgcatggttcaccttctttcctgtcctcccccaattcctgggggcttcaatgttttgttttaataaagagcccatttcctcactcctggctttgtggagcaaccatgagaccccaggagggaccccagagtctgactgtgtacacatgggggccatatgcaggacttagatccatccttcacccaacgagattcaatttcgaaacagctcagatatctcctccctaacaagtttagccttctccttgtcctgtcaaaagggaacagtgtcctggtgcctacttgatctgtcaaaaaatcttttcctggccaggcacggtggctcacgcctggaatgccagcactttgggagactgaggcacgtgagtcacttgaggtcaggagcgcgagaccagcctggccaacttggtgaaactctgtctctaccaaaaatacaaaaattagccaggcgtggtggtgcacacctgtaatcccagctactcagggggctaaggcaggagaattgcttgaacctgggaggcagaggttgcagtgagctgagatcgcacgactgtactccagcctgggtgacagagcaaggctctgcctcaaaaaaaaaaaaaaacttcctcattttttctccttcttcttcccaattctgtattcctgttctgtaaaacgaagggggatttatctttctgatatctaatcagatgcacaaataggacaaaagtcttgagcccaaaggagagcaaggttggatacgcaagttagataagatgggagaggacatctctgcaaatggtgggacacacagaaagtagcaaaggccaaatgatagtgggtgacaagcaaggaggaggaatccagtcagtgagaaagagctggcaaacttcagcagaaacacggctgaagcacagcgctggcaaaggggactctggcagggtatgtgtgcttgggacaaattagccttcaagtctaccgtctctgaggggacaccagctgaggggaagctgaccctggctgccagccccaagctttggggaggcctgtcctgggggtcagtggtccgctgactccccaccgtgcccacctcctcggcttcccagctgcggtggcccagggaggcctcctgccatgcccacccccaccaagccccatctcagcgctccactgggggctcttagcccagcccccattgcacctctgacggcaggagctgcagtgactctggcacctgggtctggcctggccggccccaccgctgggaactgcagtctagtctagaaggtccaggcaaactctgcccaggagagacagaggaaggagccctcagagagctgctctccctgtctccccatcccacagcctgtcccaagcatcagtggttaaaggtggcttctcctgagatgtctcatgtgcccgatgtcctggggcgctgtggccagctgagcaaagccccgcctagcactgacacccctccttttctgcctccctttccttctcccctcactctggcttctctggggttgcaccaaccaccaccccaaaaagggattcacacataagctttgctgcaggctcttttctagggcgctgaactagctttgcctctggaaaatggtgcctctctgcggaggggcgggaggctgccttctgcaaattatcacctcgttaattttctggaatgggtgtagaggcatatcatctgtgttcatttccttctacaaactgggtggcttaacacaacagaaatgtattctgtctcagtcctggaggccagaggtctggcaacaaggtgtacacagggctagggcaggatccttccttgcctctcccagcttcaggagctcctggcactccctggcattcctggcttgtggttgcatccccctcctatctctgcctctgtgttcacagcgcctccttccctatgtttctgcccaagctgtctcggcttcccacttctaaggacacttggggtgccatgtggggcccagccaggtaagccaggatgatcacctcacctcgggatccttaaccgtcacatcctttctcccaacaaggtcacattcacaggctccggggattagctttgggtggggggcatttttcaatctagcataccatcctcactcccctggctgaaatgtgcagcagagaaagagaaaagaaagaaaaacaagtgaaatgccaacccaacaattctaaaattccgagacgcatgagcagggaaaagtgcgatgtttccatttctagtgccttctgcgccacaggagagatcagaccttcagtcttcatatcggcatgtgttatttcttccttgggagaaacaaagcgaatcatccagtattgccgagtggaacggcgcacacgtgggagggctgggagtagctgggtgtccccggctcctggtgagaacccccgccacccaacctcccccagcctcccaatggcttatttcaacacctttgggccaagaaagctggagtggaactgtcagtgcccccatttaaaacccatttgtgaatggctcataaatcacacccttagaaaactcactcctcattataattctgcagagaaaaactctgttcagcaattgcaataaatgtgagagtgagtaggttgctttttcagcagggggtcatatggaagagggttttgcattatattcttcagtcttaataaaaacaggaataattacgagcatgtctccaaatgtacaaagtctctgctgtcagacttcacagtggccgctgaacacaaagtgtgatttcggagaagccagaaagggtcacaatccccaagacctcaaccttgctgacccagtgaagcaactaggttaaagtcccaaattctaccattagagcttcctttctttgggtttgcccctggtcaaaacattaacattgctggaaggagtcacattttaagcacggttttgtttatacctttattctggcattttcttttcttttcttttttgttttgttttttttttttgagacagagtctcattctgtcatccaggctagagtgtagtggtgtgaccttagctcactgcaacctccacctcctggattcaagcgattctcctgcctcagcctctcgagtagctgggactacaggtgcacaccaccatacctggctagtttttgtatttttagtagagacggggtttcaccatgttggccaggctggtctccaactcctgatctcaagcaatccacctgcctctacctcccaaagtgctgggattacaggcgtaagccaccaattctgtcattttctaagaacaagatggttatagtgcacggtgatgcaccagataggataaggagacatcattgagggtgaagatgaacaatcacagtccgggctgagtcccaggctatgcctggagaaggcctctgtgaatctgattttatagaaaacctaaaatgtactaagtgcctactcgacatccagggctatgttcttccacatagagtgtctcatttaatcctcacattaacctgtgaggtaggcaccaaagctcctccaggtgtgagtgggatgggatctaaaaggtcgctcctaagtccactgttctagttcaaaatgacaccaaatgagttaagggtgtatgtccatataaagttaagttttacaaaagaactgtaagtgataacttctatttccagaccatgaagaactaggagcttgagggactgacttacttcccaacaagatctcagacatgacatattcctggaggtggaagtcttcagggatgccatgaaatagacagacacagacaaaggaaagctgagcctgaaagaggatgggggaggtgcaggagaggaaaggaggtagatgatcgctcctgtgaccagaactgaacaggaatcaccagtgaccagggcctccacactcaggagctggttgaaaggcagggagctggggccggagtaactaactgagaatcggagtgatcagaactggcctgaacctgtggcaacaggccagggggtcaggtggtcccgaggcagggtcccatgtggggcctgaatctgagattctcactctatgaaaaattatttgagagattctaaggtgatcatgaatggaggagagggggcttccccagctattggcacaagcagaggtagtctctttggaggaaacttttccccaagttagttttgcaggaatcccacaaattaaaattatgcatgacttcacaagcaaaaattgacagatacttgggaaggcaagtcactatgaatgacagctaaccggggcaagaaacattccatcccaagaacaacagatgttctgtcattgcgacaaaatgcagaatagttaagtatacaatgtttaaagaagaaagaatatacttataaagatgaataaacaagaagaaactatgaagcatgaatggatagaatcaggaaaaaaacataattaaattgtaaaaaatgtattactataactattaaattaaaaaactgaatggacaagttaaacagttgattacactgttaaggagggaattaatgagctggaagatatatttgaataacttatctggaattcagcagagaaataaagagctggaaatgtgaaaaatataaaggatatggagactagaatgaggaggtctagcatggggctgggaaacaatggctcatgtgccaaatcctgctggccacctgtgatggttaatactgagtgtcaacttgattggattgaaggatacaaagtattaatcctgggtgtgtctgcgtgggcattgccaaaaatgattaacagttgagtcagtgggctggggaaggtagatccacccttaatctggtgggcaccatctaatcagctgccagtgaatataaagcaggcagaaaaacgtgaaaaggagagatgggcctttctcctaggctggatgcttcctgccctggaacatcggactccaagttcttcagttttgggactcagacctggctctccttgctcttcagcttgcagacggcctattatgggacctttgatcgtgcaagttaatacttaataaactcccctatatatatatatgtatacacacacacacacacacacacacacacgcacgcacatatatatattctgtccctctaagagaaccctaatacaccacctgtctttataaataaagttttattggaaaacaaactcctttgtttacacactgcctttggcttctgtcacactgcaagagggttgagtagagttgagaatgtacatgtccttcaaagcctaaaatatttactctctggccttttaccaaaaaagtttgggccagtcgtggtggctcatgcctgcaatctcagcactttgggaggctgaggtgggaggattgcttgagcccaggaggtcgagaccagcctagggaacatagtgagaccctgtctctacaaaaaaaaaaaaaattaaaaattaactgggcatggtggcacacacctgtggttccagccactcaggaggctgggacgagaggattgctttcagtctgagaggttgaagctgcagtgagccatgatcacaccactgcagtccagtctcagtgacagtgagaccctgtctcaaaaaaaaaaaaaatttcccctgctgtagtctatatctgactgggaacacagaaggaaaaaatggagagaaaggaagagaggcaatattttaaaaggtaatgactagattttcccaaactaatttaaaacatgaagccacatatccagagagtacaacatattctgagcaggctaaataaaagacagtcatactgctgttctaggttgaattgtattcctgcaaaagatgttgaaattctaactctcagcacctgtgaatatgacctaatttggaaatagggtctttgcagatgtaatcaagttaaggatcttgacatgagaccattctggatttgatatgggatccaaattcaatgattgatgtcttcgtacaaaaaaagcaaagagaatgagagatcagtggtatgaagacacagggaagaagccacgtgaaaacaaatcctgcccaagccaaagagagtgtggggccacgagaagctgaaacaggcagcaggagttctcccctagagcccttggagggagcacgccttgattctagactcctggccttcagagctgtgagagaataaacttacgttgtttaaagccacccagtttgtggtgatttgttacggcagccccagggaacaaacacagattttggtgttgatgtgggagaataaaaaatgattccaagttctttgttattccccacactaaagagatactatttatttcccctcctcttgaatctgggctggaccgtgactgttttaaccaacagaatatgcagaagtgatgctgtattagtccgttttcatgctgctaataaagacatacctgagattgggtaatttacaaagcaaaggggtttaactggctcatagttcagcatggctggggaggcctcaggaaacttacaatcatggcagaaggggaagaaaacatgtccttcttcacagggcagtagaaaggagaagaatgagtgttcagtgaaggggaaggccccttataaaaccatcagatatcatgagaactaattcactaatacgagaacatgatgggggaaattgcccccatggttcaattatctacacctggtccctcctatgacatgtggggattatgggaactacaattcaagatgagatttgggtggggacacagccaaaccatatcaggtgccatgccaggtccaggccccagccttcagaagccgtggcagagtctgcatttacactactgggagccgggagctgccacaaaagaagtgcagtgaccctgctgaagagaccatgtggagaagccagaggagagagagagaccatgggaccacatggaggaaggcaggcccccaactccagctaagcctggccttctagatgccccttcttcccacctctttggaactggctttgagttttgcctcactcctgtcccattccagggcctggttctcaggactggaacccctagtgctttctgggtcctggagcacttcctcagaggcagctcagaatcagccagtcctgccccagggcttctgttacatgtggggaaccatcttggatgcctctgcccagtggagccactgcagcttcaagcaatgtcatctgcagcagaagagccacccagctcatcccagtcaacccacagaatcatgaggcatctataaccttgaggaagaagagactcttacagatataggcgttgtaggcaaaaccaggtgtagataaatggctggttcttggttggctattctcagcagatgtgctgataatagtaaattctttttttttctttttttttgagacagaatctggatctgttgcccaggctggagtgcactggcacgatctcggctcactacaacctctgcctcccacgttcaaatgatccttccacctcagcctctccagtagctgggattacaggcgtgcagcatcatgtccagctaatttttgtattttttgtttttgtttttggagagaaggggtttcatcatgttgcccaggctggtctcaaactccatggctcaagcgatccacctgcctcggcctcccaaagtgctgggattagaggcgtgagccactgcgcccagacagataatagtaaattctttagatacatatgagtaggagcttcccagagaatccagccaaaagttaacccttaggtcttagtgtcatatgactctaatattgttaacacacacaggaaggccttcttctaaatagtagtattaataaacactttttttttctttagacagtttcgctcttattgcccaggctggagtgcaatggtgcaatcttgtctcactgcaacctctgcctcctgggctcaagtgattctcctgcctcagcctcccaagtagctgggattacaggcctgcatcaccacgtccaactaattttttgtatttagtagagatggggtttcaccatgttggtcaggctggtcttgaactcctgacctcaggtgatccgccggcctcgtcctcccaaagtactgggattacaggtgtgagccaccatgcccagcctaaacacttatttttacaactaagtaaataaatcttaccaaataaaacatcaaattatcaaataaaacaaaacatcaaattaacaaatactgaatcaaatcaatcataaaaacaaactcatcgttaaatacgtgccttagggccagaaacttgaccactctgtggaactgtagagacaaagtggtactcacttatgtaaccatgcacacctcatcccagagtcagaaataaaaaacacaacatacctgagacaaacaaacaaaacaaggtcacctaaaatgaggaaaaccttgtgcctttcctgtaagttactcactcctcaatgaaacctttaccccagacttttgcaatgctgctgcttaaggatttatcaggacctttgtggatatgacaattgtgtgatgaattttgtttctctgccatgcacagactactataaactcagtggcctttgtaatttttgcgtttgtttactttaaatgcctgttttatttgatgatccatttcttccagccccggaacatccttgcagatctttttcaagcaaacttttttttttccccaaatgcttttgtctcaaaatcttccattcccagagactctgaactcagagagggcaggcacagcagggggtgggggtgggcactgcatggaaataggagaattaagcgaagatctatgtcctgaatagccatgtactcccactcagctcccagaacattgaaaatgaggtgccttttttccaggcaagaaattggaggatttgtctctgaagaatctaaatggcctcagtaaaaatactgctgagattaacagttagggcccccggttaaaacaaacaaacaaacaaacagccctccaatcaccctgcagagaagcccaaccaccacatgtcccagtaaactctgcagaccttccctgcaggctccttctcttacaggagaactctccaggatctttccttttttgttggtttgttttgttctctatcatattagacaccattctcttacacaggttacagacatttttccccagcattttaatatgagatggtctctcacgcgacaggcaaaaaaacaaacaggagaaaagacaaatgtgggcagcagatgagaagctcaaaaattaaaaacaaaatttttaaagagaatacagtgcatccataaaacaagaacagaatgatagagaaaaagagggcacaatcagagagcaagaatgggcttttagaaagtaacgatgcatttgctaaaatgaaaaattcagtagtctgattggaagatggagtgaaaaaattatcccagaaagtagaacaaaatgacagagataaaccagaggagaaaaagataaaaagaaaagcaaaaagtcaattcagaagccaacatccaacaacaggtggtctagagaagacagataatacagagaggaaaaaaaattaaagaaggaagaccccaaacaactgccaccactgaaatgcatgattttccagactgaataggccagagagtacccagcacaatgaatggagcaaagcccccataaagattgtttcaaaaaaaaatcttaaggtctttcacagggaaaaaatagtttctatttctaaaaattaggatgatatcaacttctcaacagcaacattgatgctggaagacagtaaagcaacagcttcaaatacaatttccagactctagaattatataactagacaacaattcgagaatgaatgtagaatgaagacacagattggcaaaatcccaaacatgtggactcccatgcatcctttctcaggaagctaattgaaaatgtgcttctccaataaatgatccaagtaagacacgatgagagacagagagagagagagaaactaacacatgggaggcatgaggtatcacagcccagtagagtctgatggggaatggcaaatatatggtctcaaagtcacccacaaaaatacttactaattacattattattattattttaaaacagagtctcactctgccgctcaggctggagtgcagtggcacaatctcagctcactgcaacctctgtctcccagtttcaagcaattctcctgcctcagtctcctgagtagctgggactgcaggagtcctgctaattgtttgtatttttagtagagatgggatttcatcatgttggccaggctggtctcatacttttgacctcaagtgatccgcctgcctcggcctcccaaaatgctgggattacaggcatgatccaccatgcctggccgcttactaattacattatatttgtgagaggtgtccataactaaaaaaaaagaagaagaagaagaagaaaagaaaataaacttactaattacaaagagaattgaaacaaattcccggtggggaagacagatatcaccttaatcaaatgaggaaatttaacatcaatagtaatagggccaatgaaaatcatgtacacttgaaaggatgcaatgagaacacagcgctctggccagtgatgcctcacctggatctaatcacaggcagcagcggacagaaaggcagaggggctgcttcagagcaaaggaaactcatgagacatgacagctaaatgaaatacatgatccgggatcggatcctgggtcagggagaaaaaagttataaagcaccttggtggaaaaattaatgaacttcaaagattaattctgggttaaataatagcagtcctttgacaggaaattttctaattttaataattgtatcaaggttatgtaagagagtaatcttgttcttaggaaatatacactaaagtatttggggataaagggtaaaggatatctccaacctattttcaaatgaatcagagagagagaaaatgattcatcaaatgggaggaaatgtaaacaatgtgtgaatttaggtagaagtacatgagtgttcttgcaacactcatgtaagttgggaattatataaaaagttactaaaaggctcattcattttattattatttcatttccccccaaaatttacattttatagttaaaaatgtggtattacgccaggtgcagtggctcacaccggtaatcccagcacttcgggagcccaaggcagatggatcacccgaggtcaggagttcaagaccagcctgaccaacatgatgagattcccatctctactaaaaatacaaaaaaattagccaggcgtggtggtgggcgcctgtaatcccagctacttgggaggctgaggcaggagaattgcttgaaccagggaggcagcggctgcagtgagccgagatagtaccattgcactccagcctgggcaacaagagtgaaactctgtctcaaaaaaaaaaaaaaattgtggttttactaaaggaaccaatgaactaaaaggcaatataacagaagttaaagagcatctacccagaggtagacagtaggctaattaacctccctatacctcaccttcctcatcggtcaaagtgactaataatagtacctataccataaattttgaggattgtataacgtaaaacgggtagcatccataccaccttattaaaaaagctcattttaagaaacatacccttgggcagggcagggtggcccacgcttctaatcctagcactttgggaggtcaaggtgcgtggatcgcttaagctcagaagtttgagaccagcctgggcaacatggcgaaaccctgtctctacaaaaaatacaaaatcagtcaggcatggtggcatgtgctggtagtcccagctactcagggggccgaggtgggaggataacctgagcctgggagacagaggttgcagtgagctgagattgtgccactgccctccagcctgagcgacagagccagaacttgtcaaaaagaagaaagaaagagaaagaaagaaagaaagaaagaaagaaagaaagaaagaaagaaagaaagaaagaagaaagaaagaaagaagaaaagaaaagaaaagaaaactgttatggacataacccctctcttgttctggttgctcagatcacagcatgcaatgtcaatattgtgtggcttatttgtgcagtttgttcttttatatgcctgatattcaaattttgttaaggatcctatacagaaagaaggtgacaagagccccatgttgctctgacatgtcccactatttcccaagacctatctcgttttttctttctttacatttcagaagcatccctgctccaagagaacaaaggcaagctcatagacacatccttctttgtaaacacagtaaagaggaggggaaaaaataaaaggcacatccctcaataactgggctctggaaggcaatacactggagatagttacctgtgatctggagacatgaacctagaatagaagaagtgccatattagatgtctatttccatctatgaagaagtgtcttagcaaactttgtattaggaacaactacactagctggataaaatacaaaagacagcattcagagtgcctgagagaacaaacaagacatccagattggatcctggagaggtcctgaggaaacacattgaggtgagccccattctagcctctactttttccctcggagcatctgccgatttgaagtacaggccacaggggatgaataaaaagcagtagcggggaacttgcatcggtctcattgagaaggctggaaagaaaaactatttgaatgtagaactaccaaggcagccagtacttgaggggcaaaaattcaggggaaggggggactgcagagatatgagcttcacattccatgtggcttttgctataggtatttccagctcaggactgaaaaacaaatagctgctgtaaagaaattacaaatcaaaacaacaacagtcttattgacttcaaaaatgtacccccaaaattcacgtcttccctaagtctcagaaagcgatatttgggcatgtaataagtaagcatcttgagatgaaatcttcctggatttacagtggtctctaatccaatgactggtgtccttataggaagaggtgatgacacagagacacacagaggggaagatgtggccaaggagacagagattagagtgaggcagccacggccaaggagtgcctggggccaggctgggaaaggtaaagaaggattcttccatggggccttcagaggaaccatggccttcctgacaccttgatttcagagttctagcttccagaactgtgagagaataaatttctttttcaaaaaccaccccatttgtggtaatttacttacttcagctccaggaaaccatacaagtctaatggtgctgaagatataaaaatcatcattcagggcctgccagagaagagggaccctggtaaataccccaggctttcagttgtgatcccagaaggactgtgccccagtataaaggaaatcagacttagtcttgacacaagactaaattttctcagggatgaaaaataccgcaccaaaaagtgcatacaagacatgcagagccagcatgaagatctaacataggtataattgcagtggagaagagctgagaggatggggacaagcaatatttgaaaagatactaaactggaaagtttccaaaactgatgaaagacatcaaaccacagaatcaagatgctctgccaactccaaagaggataaattatttctaggaaaatcagtaaaactgatgaaaaccaagaccaaaaaatatattttttcttccccagctttattaggtataactgacaaatacaaattgcgtatattcaaggtgtacaacatgatttgatatacactaatatggtttggctctgtgtccccacccaaatctcatctcaaattgtaatccccacatgttgatggaggggcctgtaatcaccaggtgtcaagggaggggggtgattggattatgagggcggttcccccccatactgttctcgtgatagtgagtgagtctcacaagatctgatggttttataagtgtttgccagttcctccttcattcacttttgctctcctgcctccttgcaaagaaggtgcctgcttccccttccaccgtgattgtaaatttcctgaggtctccccagccgtgtggaactgtgagccaattaaacctctttcctttataaattacccagtctcaggcagttctttacagcagcatgagaacagactaatacacacacatacacagtgaatttattatcacaaccaaattaattaacatcagaattagttaccgtgtgtgtgtgtgtgtgtgggtgtgtgtgatgtggcacttaaaatctactctctttagtgtgggaggggagtgagggatgagaaattatctaataggtacaatgtacagtattcaggtgatggtcacattagaatcccagtcgtcaccactacacaatatctccatgtaacaaaactgcacttgtactctctaaatctataaaaataaaaattcataaaataagataaaattcataaaatctactcttttcacagatttcaagtgaaaaatataatattattaactttaatcaccatgctgaacccccaaaagctttaaaatagctagagaaaagaaaaaacacattacctttaaaggagcaaaaacgtaagaccaacaactgacttttcaacaagagcaacagaacatggtaactaattctgataatggaatataaagatacctatttaatgggggtggggagaggagaggagtatctacctgccaccaacatcatacttaatggtgaaatactgaaagatttccccttgagaccaggaataaggaaagcatgtctgctctcaccatttcgattgaaaattgtattggaagttctagtccattgcactaagtcaagaaataaataacagaaaagaaggactgtaaaggataaaattgtaattctttgcagacagcatggcatgctctctgggctacttggcaggtgtgagcccttcacccatctctagtgcaggtaccaggagtgttctggcacagagattatgatcctttgggggtctaccctatgtgctgggttgaggaagcagatgcttgggaaggagagatgcctggcttgatttagctgcttctggccaggcacagggcatttgtctaggggctggcaggaaggggagcctggcagctagtggagtgcacatgggtgcactgagttgcaaagtggggcccttcgtaatgcaagggtctagatcttccatgaaagtattatatcctcatgcccaagggaaagtggcattaaatagcaacaaacaaaaatcaaaaccaccatcacaagtgaagagagaaactgaagaaagagaaaaaaatgtgcttcgaattttagtaccttcaatgtcacttgttcctacttcttgaacaagggtctcacatttttattgtgcactgggccctccaaatgatgtagattgccctgctcccctttgtacctcaaggcatagcttagagcagagttcaaaaaaggggagacacagcaggagtcacatagctgagaccatccttctgaggccggaagatcatggagctggtgaagcctgctctccagccccatgcctcacatgcctgtgatgcactcctgaacacctccctgcactgggctcagatggaagaagtctgaacaacagatgcgcacgtcaagggggtacccttggagaactaaacattcttcttttaataccctgacttacactttctctttgagatacattttttcatttgtagatagtttggtatgtacatctaaaacagaagggctctttcctaaaatatgtaattacaatatcactgtcgatcatatttctcaaggatgaaaaatactgtactaaaaaaattgacacttggccgggcgtggtggctcacacctgtaatcctagcagtttgggatgccgaggcaggtggatcacttgaggtcaggagttcaaaccagcctggccaatatgatgaagtcccatctctactaaaaatacaaaaattagccaggggtggtggtggatgactgtaatcctagctacttgggaggctgaggcgggagaattgcttgaacccaggaggcagaggtttcagtgagccaagatcgtgccactgcactccagcctggatgacagagtaagactctgtctcaaaaaaaaaaaaagaaaaaaaaatgacactcgtgtcttgataccatacaaaaaaaattgacactcatgtcttggtaacatcgagtatccagtcagtcttcacatctccctgattttcttatacatttgcctgaattaaaatgcaaacaagattcccactttgcatgtggttgatatgcctctcaggtgtcttttcaactatgggtttccttcctccccactcccttttttctccttgccactcatttgttgaaggaactgggctgtctttccgataatttcccgtattctagacttgctggtagcatcctatgacactgtttcacgtattcctccatccctggatttcctgaaaacctgtggttaggatgtctagttagggactgaatcagattcacagctgatgtttttagcaagactgttttataaggggtatgtactccatcaggaggcaagtgagatctccaaatcactctggagaaacctccttctctctcttcccttctccctacgtgcctctcttcctcccttcctctctctgttagcagtcgttgatgataagctgatcattgctaagttctataatcccaacaaaggtttacaaaatgctttatcctcattctatccacccttcttttatgcttccattagaatatttccatagggacaaattttcccttgttaactatctatttagctatagacataattccaatgttatatttgcagcatttcatacgtgttctccctggaactttattccctactagggtataaagaggaaaactgagcaaaaacaaggagcccctgtggatacctatttccttaattcaagtaactgatattccacctatatatctttcaactcagaatatgtagggccatgcaagtattttgtttatttcatggttattcctgtagccttttggcatttgacattgtaagtcacaatcatgattaatacatgagctctgggaaactttgattgatagatcactaatatttttaaggagtagctcacaattaccagactgcactcaaaacagcagaaattctctccaagaaaatgtgtaaatagctagtttctacaggagaggaaacctctctgagtttgtcaccttcagctttggttcacactccacctgacccatttaattatacaagggcatcagtcattgaaagctaaaattaacagttcatgacttttgccagagagctctgatatctccagtggaaattttccatactgctcttgtgacagactgacatccactgatgttgccacagagaaacaaaaaataagaaatgaggtttttgccttggtttttcagtaattgccacatggacagcctgcctggtcttggtgacaaccccactttggtcacattcacataacacatagtttttagtcattgactgtgggcctggtgctgagagtaaagaagtgcacaagacaaagagcctgtgcccagagccaggagagctggcctcctacaccagccccagcactcactggccacatgggttcaggccaagtcttgaaaatcacatagattcgaggcattggaagagttcccagggaaagaggcactccacaccaagtcaggaagagccagattaaattcccagctccctcccttaccatctgtgtggcatgagcctgaggtcacttagaaatggtcagaaaggaagaagcagatgaaatgggagagtgcaaggaagatccaggggaaaccacatagctatcgtttcttctttaatcagggtgtaacattcatatagtaaaatgtaataacatgcaccaatcttaagcacacaacataaggaactcttcacatgaatcccatataaccaccacccagatcaagatatagaacatttccagcacccacagtagacagacattttaatgtgaaaataccaaaagttgaatcccacaacttctattatgttaccacaatcagtcctgcctcactccagtgccaactccttaccagtggagatgggtttacagttccttgttctaccctcctggtgaccaagagcaccacttacagactagcctactgatctggggttacagatggagcctatagatctgtcttagactttgttttttttttttttttttttttttttttttttttttttttttttttttgagacagagcttactccgttgcctaggctggagtgcagtggcatgatcttggctcacttcagcctctgccttctggactcaagctattctcatgcctcagcatcctgaggagctgggattacaggcactcaccaccatgtccagctaatttttgtattttttagtagaggtggagtttcaccatgttggccaggctggtctcaaactcctgacatcaggtgatctgcctgcctcagcctccaaaagcactgggattacaggcatgagccactgtacccggcctggcttagacttctaatgtataatgagttaactggccagtgctgcactggcaaaatatacaaaatattgtccccttcttattttactagctaaccagcccagattttctttatattacaaagtgtactaaatatcataaaattactacatgggcaataaaagttgcggggatgtaacagcatccttcttaatagccaactggtgggaaccactcaaaagtccatcaacagatgaatggataaacaaaatgtggtttatctatacaatggaatattatttagccataaaaaggaatgaaattctaatatacgctacaacatggatggaccttgaaaaaccttatactgagtgaaagaaaccagacacaaaagaccacatactattctatatatttccattcatacacacatccagaacaggtaactctgtagagacagaaagtagattagtgattgcttggacctggtgttcagggtggagggataggaggttaatagctaaagggtatggggtttgttttagaacattttgataaaatgttctaaaattataatgttgtttgcacctatttgcgaatatactacaagccattaaattgtacactttaaatgggtgagttgtatggtatgtgattgctatggtttgaatgtctgtcgcctccaaaactcctggtgaaacttagtccccattgtaacagtattaagagttggggccgggccaagtgcagtggctcatgcctataatcccagcaatttgggaggctgaggcaggcggaccgcttgagctcaggaatttgagagcaatctgggtgacacgtcaaaacttcatctctacaaaaaatacaaaaattagttgggcatggtggtttgcacctgtagtcccagctacttgggaagctgaggcaggaggatcaccagagcctgggaggcaaagctgcagtgaaccaagccacaccactgcattccagcttgggcaacaagagggagatcctgtctcaaaaaaaaaaaaaaaaaaaaaggctgggcacccatggctcatgcttgaactcccagcactttgggagaccaaggtgggtggatcacttgaggccaggaattcaagaccagcctggccaactggtctctataagtagaaaccccgtctctactaaaagtgcaaaaattagctgggcatgatggtgggctcctgtaatcccagccagtcagcaggctgaggcagtagaattgcttgaacccgggaggtggaggttgcagagatacagtgagctgacatcgcaccactgcactccagcctgcgcaacagagtgaaactttgtctcaaaaaaataaaataaaatgaaatgaaggtcacaaacaccgaggaaaaagccaagtgaacataaaggcagaccggaataatccagccacaagccaaggagtgcctggggccaccaggagccggaagaggcaggaaggacccttttctagggccttcggaggaagggcagccctgctgatacattgatttcagacttttggctggtctgaacggtgagaagaaatttttgttgtttcaagccaggaggcggcgattgcagtgagccaagatcgtaccactgcactccatcctgggtgacagagcaagactctgtctcaaataaataaataaataaattactcagtcccaggtattcagctatagcaacagaaacgggctaagaccatgattatatctcaataaagccatatttaagaaaagaaaacaagggagcaatacaaagtaaattgaactgtaacttaaggtgttattacccaaagatactcacgatcagcattgtgaggaagatccctctggtacttttctacctgtaatttcgttgttattttacttaatcatcatcatacaatacatagagttttataggactggaatgatttctaaggtataacagtcagatttaggtgccaacaccagaaatttattgagctatttcaagcacaaagagatttaacagaaggactctttggtgtttacgaaactgttaaaaagactgggtagagactctcgactggcttcccaggaatggatcacacgcggaactggccagccaaggcagctgttagcactgccacagccaataatagcatcaggaagctgccactgtgactggtgaatccagcaacggccttgttagctgtgattgagggatctgaaaaccaccactggaactgccggcttcagagccttgccactggcacctctgctaatgctgccaggcacacacatatccagaaaaagcattcactgattgtgcttacagcagaaaccacaatggcagccaaagtgtggcggccactttacttctcgaataaatgcatccaattggtcacacctaattgatatcaagaaccttagctgcaagggaggccggaaaatacaattatatatagaaaggtatttaccaaaccatgttagaagcttttaaactattttaaaatagctacataacttttcattaaatatacatacatagatatatatatatgcatttaattaatcaacccccccacctatttaggatactttgtttccagagttttatattatgaatattaagaatccaacatttaatattataaataatataacgatactgccaataataacaactacagcttatttaatacttccttcttccaggcagtgtgctaggtaggcccttttatattcattatatttgtcaatcattttttagttaagactcaacaacctgcttatggggtaactattaatcccattgtacacataacaaaactgagggttaaagagaagtcagagctagatttaagaccaaagcttgcatctttaaccaatatgcaaatactcatgcaaaaagacttttttggtcttagaaatgatctccactggacaaataaccagaaatagaattacatactgttcaagagctgtgaatgcttctaaatcccttgagatacatgaatgagcaggccagattctcagttaacgtcactgtcaggactgtgaacacctgcatggcaggagctcccttttatcacttgaaggcctggctcagcgactggcacactgtggccactccgtgggtgtttccgtgagtaacagtgggtgtgcaggcagaagtgcatgaaggcactccagtccaaagaactgcattccttttgcagcacaaagcacgagctgtatctaggctagtccagctctagaccacacatgaaagtgagtgcctgaaacatgcaaccctctatctgctttagccaccttcacgcaccagctaagtcatcgcactttccatgaccatgttgcctgtgaagagaatgaacatggtctgataaatcaggcatccaagcaactgtgcacaagactgcagattgcatccattgctttaggtaggtcaatgggagcaatttttagcaagtgcaactgtgtcactttggattatttaataagttaactgtcctatttaatactgattctctaaatcaatattagcgactcatatgtattgtcacagtccaccaatgcccagacaagttagactgtgagcccgaggacttcagaagatgcattaaccactgcaggccaccaaatagccttcctaagccttgccctacttctctaccaggaaggggtttatactcacacaactaccagctgaagggattggtattgctaataccttgggacctccgtgtactgctttttcctacagagcaaagtgtagaggcaaaatgattgctcttggggccaggcatggttgctcacacctgtaatcccagtactttgggaggctgaggtggggggcgggtggatcacctgaagtcaggagttagagaccagcctggccaacatagtgaaaccccgtctctaccaaaaatacaaaaattagcctggcgtggtggtgcacacctgtagtcccatctactctctactcgggaggctgaggcacgagaaccacttgaacccaggagatggaggttgcatgaaccaagatcataccactacactccattcaggtatcacagcaagactctgtctccaaaaaaaaaaaaaaaaaagaatgattgctcttgggaatttcaccactaagatgccaaaaaaccatggcacatcagctggcctataatgaggtgggtctacgttccagtgaatttattccatctttcagactatatcacgtggaattttcttatagtctttctccccctttaaaacaatcctaaggttattaaagatactcctttcagtactgccttccccaccccttgggctacactattcagctgttttttaaagaacagaattgtaacttgcattatcaatagagaacattcctggagaaaacacagatgttttctggctcgtgtcacacaggcggttctgaaatctacgaagttatatgaggacttcctggcaccgtgagaggaaggttgggaggcagtattactcagccagaccaaaatgattttatttattccacatgcctaaaaatatgtttgaacataatgtgccataatttttctggtgatttctatgaatcagtttttaattatgaataatgtttttagagatactcctgagaaattgtacccaagtttcccttgacagccatcacataaagtatctaaaatgaagcagcttccacggctaacacagaaaatcaaagcatgaatttctaaaagatccattagtcatctttgctgagaacaagagtctcacgattcgcacatgcaaagggtggctgagaaattcaggtcaacaaacataactagaaaaagacggttactgtcaaataattgttcaaaggagttttgtacaaatataaattttgtaacttcacttggagccttttttcttttcttctagttaggaattttctctgtgtttgaattattgcctttctaatcctcagctgacgttttgcagcttttaagggatcgctgtggctacagcaggaaacgttcctgctccatggcccaacgcaggccactcagaaattaaaatgtttgtgcaagataatgagtatgaatttccatttctgggatttacttttagaaaatccagctactgaaactcaatcaaggagggtccaagtgacaccctgtcaaagaacagatgggtggggtcagctctggaattcaagtacttttcgcaggtgtatctctcctggaaaccactttcctgcatttgtcagagctcacagcttctgcgaaaatgtcggctagggatcaggctaaacagaagtacaaataactcaagtagctttcagtggagcacccttaatgttgcttaaacagggaggtattttctggtcaattaccttaagtagactccagtaaacgcgaaaattatttttgcatgagtaacaacagcgcttatctttttccttccccggctcccaactatccaggaataaagcaaattcacacaggagtattccaggactcacaaccttgtttagattgtttaaaaggaattggaggctgtggctttccatccagtgtcgagagctcccgagcaagttgaacgtggcgccggctgcttagccagaggaagccagcgtctacctgtgtcactgaacggcgctcctcccacggcgacacctccgtgctctttttgcttgtatttattcaaaaattagatttgtcaataacgcagggcctggcaaataggaggacctctccaaaattaaatgcaagattgaacataggtctctcacatcataataaagcggtttaatttggcttccaccgggggagcggaatagcacttgcccagcccctttgagccctgcgcacactcgcaccaccgccgcctctcccacaaagagaaaagccacgagaagggtcccgactgtgcaaatctgtgtgccctcccgaggaaggcgcccgagggctcactctgcctggttcaaaagcttgtgggagagaagcacccaaaagaattccgttgtcaggttaaagtctttgtctatactcgcaggatgggaaggacgatggtgcaatcaccgagattattttgttttcgtcctctaaaaaatgaagaggggactggagtcgggaccaaaattattggcagaccgcacggtttgcagtcaccctgaagttaccagcagccgatgctgtgtccagggaaaatattcttgagctggaaaacgtgctaatttaaagtctttcgtttcacacgaaaatgtgctgcactctttgactgctcaggaatttgctctagcacctagaaggaattctggcttagggcaggggcgagggacagtggagggcgttggaccttcttccgcaatcgggaccactccaggtctccccggagaaggctgagtctccagcgcgtggattcagatcaggactctgtctaagtaggcgagagctggggataccgctgggggctttggcgaagctaagaaagcactggcttcttattctcaccagacatctcaacacccacgtgcgctgggtcccgcagtctctcgcccgccccacgcgggtcccagccctggtccttactccccgcgcgggaagaatctggggagggtgggggcggagaggcggctgatcggagagtgggagggaggatgggagatgggcagaggctgcccgcatcagggccaggacagacgtccgcgcggccccaggcactcacttgagtgtcacgcaagtcaccccaacaccgcacaagacagtggcggggtgcgcaccgaggcccctacctggggggtgtgcgcgcactgaacgaccccttctccaggtgcgcgagccgctccggcggccgtgcacactgcgcccccttccgcccacctgcctggcctgcgtttctaaccacgcgggcggtcccgagacttcgcgcaaaaggcaggaccgcgactcccaataatgatatcttcgaaataaccccctgctgagccggcgcccagggccgggggtagagtcccgagtcccttttgcggaattaaggagacctctggcgaccggggagcctgcccctgtgaccgctccagcagcccctgccgcgtgcgtgcccgagtgtggcccgcagctcccaaagcccaggtgtgtgtggcctagggcggggagagttggcgacccgggcccatcaccgccccagtgccaccgccccagtgcctgaccagatggggtgcggtccctacgcccggcgtggccccgccgccgctcagatctgaagtccggctttcgctcgccctgcgcggcggaacctctgacccggagcagctctaggccgtgggcttcgtctcctcctcctggaaggaatgaatgggctccccgacacacacctctcagaaaactcacctttcacgctgaccttcaaaagaaaagaaagaaagaaaaagaaaaatccgctcgaagcgggaaaatgtccacgcccggatttggggtggacacgcgccccggcctggctggaggggccaacccagcggggcccgcctgcccgccggcctttctgtaactttctctctttaaacttccaatgaatgaacgtgcctcttcttacggatttgtttagattagggaatagattcctcgctgatagcgttgctttgcaaataagacctcctatattattcaaaccaaacgagtttgtgtctttaaaggactatagcagccccattctatgttaagggttggctattacaattattatatgcttagggaaaaaatgtaagccccgtagtttgtgcttttcttgatgtacagaaaggtttatcttaggtggataggttttgttttgtttcttaaatgggatttttttggttcgtgtctttgaagggctgtttcgcgacgtcattaatgaactaatcggttttcagatttcaagacggtgtgtaattgatgtaaccactgaggaatttcagtgcacaccagactaagactcttccagcgcaggggattccagatgcttcttgggccctctggaagccatggggatgtttccagaccgaaaggagggctttgctggggagcagatgtgctgcctctccccgacccaggattttgaggccatgtttccgttaatctggaccgagagccctctgggagagggaggcaggtcgtagggggcgggggtgagggggagcgagatgaggtcgtcgctggacgctgggctcccttgtcgttgtccttttccccagaatccatggtcaggcctagggagccacccctgggtgctcgagatgagtccccaccctcactgaaggtcggtcactggatgtttgtgtgcatcgtaaggggcccaccgaagtcccgaagccttctcagggaccagcgagaaagaggagcaggcttgggagacagggaaggaaaatgcaggggaaagggctcacccctcgaccccaggtaaaattagaaggaacgtgtggcaacccaggtgcagctttggtcgctcgctcaaggactttgctagtcactaccattaattaattaatcactatcattaactaccaaggacaccgtttttattcccctaaaagcgtcaccttgaggggaatggagaattgggcagcagctatgcaaatcctgggacaggagacactgcctgaggaccctctctcactcccaatcccagaacccgaagttatccccgacaaccaagtccaagcacatgaaccaagacgatcagcttcaggcagctccttacccccacaagcggcccaggaggtgggcattatcccccacccctgggatttctccatccctccctcttctctcctgcgggagagagagctgtggtcacccagttgggcgcgatggctctggactaatggggtctctagacccagggcacaaaggccaatctgccaggggttactgcatgtaatgagataatcagacatgttgaccaacctaaaagaaaagactctcccagggagtaactcccagtgaaataatttattaaaaaaagcaaaaaagagacataaatttctctctactacttgaggaaacagcaaacagaacgaattagggtcttggcctctgcaggaataaattatttccgacttggtctggatacctgtaattatttgtaagctgtgggtagtaatactgtaattgtcccccggtcctttctggaagtagcaatgaccccaaggacaattggtgacgtctccacagggtttacacatggaaaggagtgaaaaatcgaggaattctttcagatagcccagaccaaaaatcctctcagccatgaaaaggtcatatatgtgatgctgggccaagcggacttttctggagtaaccatatcataactgattgcggatgtagacaagagcgtataaaccaaataggcttgaatcaacgcagtcctggattttctgttgcctctgcttgctggggcagtggaagttcttaaactccacttcagaggttggaaattcttccccctcccccacctccttagtgacaaggtctctgatctcctgctgccactgcaatagcctctcccatcccgcggggaacggccggagttcttcccttgatctctcccgagtcggcttccgctggggatggatcgcaggtaggcgccggcgcggcctggggaagaacagttgcggagcatctgaagcggaaaatccaagcagatgtgaggcgatccgggcccgcctcgttcctcttggggcctgaatttcttccagataagtttcctaatggaacatttctaagaggtggggtacgaggcggcttgctcgcacgcgcagtgggacagactgcgggtggggacgtactgagaggtccggacctcaatgcgtccgacccgtctccacaccgcccttttccagcccccagtctcctttcattccctactcttcaggctcctttggggccagtgggtgaaccgccatttagaacggtgcctcggactcgggggtcgtgcgctccatctctgcctcccccctggggcccgcgaggctggtccgggctttctgagctgggcgttcggctttaggcccaatacctggaccaggaatttcttctccccgcgccagaagggaaagacataggaggtgtcccaatctgcggtcaccgccgatgctcctgaccactctagtgagcacctgcccggtacttttccattccaacagagcttccagcttcatactaactatcccacatacggcctgtgggtattagctctaagtgtccttttccgagggcccgaggctccccctccagcagggagagctccgggacggcccccaccaagggttgggtttcttccttcacaattccacagaggcatccctgtccttcctacctgggaaacctcgaggtgcggtgcccgtgtacttctggtactttgcgtggtgccatcagggaccccagagccacagctgcgtgtgtgtgtggatgtgtgtgtgtgtgtgcgcgcgcgcgcgtgtacggcgaaaggatgtgcttgggggagccgagtacacaacgtctgcttgggcagctgctgggcaggcgttgggcctggaggtatctcacacccacgtatcttccagtcttcaaacacggcattgctctgcctcccgtagcgcgcttcgaacctgcctcgcggacacgtgaacagaggctgtccctgggaagataagtgcgctttcccgtaaaatccgggaaatttgccttgaggaaagtttccgttcttgttacttgtcgggtttctcccacttccacttagccatgtttctgcgatctgggtaatccctttcaagcccaggaggaattctcccgggtccataattgagggtcggaagccgtgggggtgagaaacgcattaaatcctcccgaagcccaggaggtgccagagcgggctcagggggccgcctgcggaagctgcggcaggggctgggtccgtagcctctaaccccttggagctccttctcccagaggcccggagccggcagctgtcagcgcagccaggagcgggatcctgggcgcggaggtgggtccgactcgccaggcttgggcattggagacccgcgccgctagcccatggccctctgctcaagccgctgcaacaggaaagcgctcctggatccgaaaccccaaaggaaagcgctgttactctgtgcgtccggctcgcgtggcgtcgcggtttcggagcaccaagcctgcgagccctggccacgatgtggactccgcaaggggctagggacaggcagggggagagcccgggtttgcgcacaccttccagcccctggagggagcctgctcggcttcgaacgccttcgaacttttgaccttcaaaggagtccctggaaaaggtcaggagcgcctgctgcaggcacggttgccgaaggccaggccttcctggcgcaggggagggccaggggagggaagcggatactcagtcgctgtccgacggcgagttttcggagcagcaggctcatgatcccgggccagtggcgagagcagtgacaccgagaacccaaatctccgcgcccccatccgcggcccggtgtcctcccggcccctgctgacctccaggtcacgcaccccactgctccacggctctgcagcctgtggcacacggccgagagtccccacatgatctcgacgccaaggtaaggaattgccctgcgtcctctgagcctgtctctggcctggggggccgggaaagctgcactcctggaagaggtggggttatgtgaccgccgctgcaggggtgcgcggaggactcctgggccgcacacccatttccaggctgcgggagccggacaggggagggcagaggggggacaaaaggactctttaggtccaaaatgaccctgaaggagagtccagaatgcccagtggccgcgtctgcaacggagtcttctttctccaattgccttctgccccatcaccatgggccccacctgcgccacctgcgcccaccctgtgaccctggctcagcgaccttggcccttaatcgcccaacgccgattcctcaaaattccggctgcgctgaatcgggctgcttttgccgccgccccggcagttgggccctgtttccgccggcgccctgggagaggcctcaccactcggctgggctccctggcccctcccttcccctggcctgagcgcccctgcggcctcccgctcctcctgagaaggcgacaatctctttgcaccttagtgtttcgaggacagaaagggcagaagggtcacttcggagccactcgcgccgttttcacgtgtgtgtgtaatggggggaggggggctcccggctttccccttttcagctcttggacctgcaacaccgggagggcgaggacgcgggaccagcgcaccctcggaaggctcgatcctccccggcagggcgcctggccaacgagtcgcgccgcctcctctcggccgcgcctgctggtgaccttcccgagagccacaggggcggcctcggcacccctccttccctcgccctccctgccgcccatcctagctccggggtccggcgaccggcgctcaggagcgggtccccgcggcgcgccgtgtgcactcaccgcgacttccccgaacccgggagcgcgcgggtctctcccgggagagtccctggaggcagcgacgcggaggcgcgcctgtgactccagggccgcggcggggtcggaggcaagattcgccgcccccgcccccgccgcggtccctcccccctcccgctcccccctccgggacccaggcggccagtgctccgcccgaaggcgggtctgccataaacaaacgcggctcggccgcacgtggacagcggaggtgctgcgcctagccacacatcgcgggctccggcgctgcgtctccaggcacagggagccgccaggaagggcaggagagcgcgcccgggccagggcccggccccagccgcctgcgactcgctcccctccgctgggctcccgctccatggctccgcggccaccgccgcccctgtcgccctccggtccggaggggccttgccgcagccggttcgagcactcgacgaaggagtaagcagcgcctccgcctccgcgccggccgcccccaccccccaggaaggccgaggcaggagaggcaggagggaggaaacaggagcgagcaggaacggggctccggttgctgcaggacggtccagcccggaggaggctgcgctccgggcagcggcgggcggcgccgccgggttgctcggagctcaggcccggcggctgcggggaggcgtctcggaaccccgggaggccccccgcacctgcccgcggcccactccgcggactcacctggctcccggctcccccttccccatccccgccgccgcagcccgagcggggctccgcgggcctggagcacggccgggtctaatatgcccggagccgaggcgcgatgaaggagaagtccaagaatgcggccaagaccaggagggagaaggaaaatggcgagttttacgagcttgccaagctgctcccgctgccgtcggccatcacttcgcagctggacaaagcgtccatcatccgcctcaccacgagctacctgaagatgcgcgccgtcttccccgaaggtgaggcctcaggtgggcggccggggacgctggggagcccggcggccccggcccaggcgggaagcgcaagccagcccgcccagaggggttgccgcggcctggcgtccagagctggggcgtctgagggaggttgcgtgagggtcttcggcttcggcgctggcttggggcgaggggccagggccttggcggcccaggcgaccaaaccctctcctggtccagggctgggtgagggcgaattacgaattgttccaggggcaggcagtcccccagcccgcacggccagcgagttctttctggttttgttctttctccctttcctccttccttccttcgccagtgcattctggtttggtttggatttttttctctctttctttcctttctttctttctttctctttctttttctttctttcttcctctttctttcattctccccttccttccttccttggccccctctctccctccctccttccttccttcctttgccaatgcattggtttgttttctttccttttctgctttccttcctttctttggaagttcactctggttttgctttctttctttccccatcccttcctttctttatccctccttcccttcctccttttctttctacgattccctttatttttccttcattcctccctctttttgtctcttctggaggaggtgaaggagggtcagcttcaggcgctgcgagtcagcggggatcacggtgaggcccaagcactgcaggctgaggccacagagcgaacacttgtgctgagccgggccctctc
